United States Patent Application Publication US 2026/0297596 A1, published October 1, 2026 (application 19/479,444).

The application's sequence listing, which the Patent Office published only in electronic form, follows.

SEQUENCE LISTING (675 sequences)

SEQ ID NO: 1 - DNA, 134 bp, Tobacco mosaic virus
  source 1..134: mol_type = other DNA
taggtttgagagagaagattacaaacgtgagagacggagggcccatggaacttacagaagaagtcgttgatgagttcatggaagatgtccctatgtcgatcaggcttgcaaagtttcgatctcgaaccggaaaa

SEQ ID NO: 2 - DNA, 198 bp, Tobacco mild green mosaic virus
  source 1..198: mol_type = other DNA
aaggtttgagggaacgtattttgagtgtgacagacggctcgccaattgaactcactgaaaaggttgttgaggagttcgtggatgaagtaccaatggctgtgaaactcgaaaaggttccggaaaacaaaaaagaaatggtaggtaataatgttaataataagaaaataaataacagtggtaagaagggttttaaaattg

SEQ ID NO: 3 - DNA, 133 bp, Tomato mosaic virus
  source 1..133: mol_type = other DNA
tgggtttgagggagaaagtaacgagtgtgaacgatggaggacccatggaactttcagaagaagttgttgatgagttcatggagaatgttccaatgtcggttagactcgcaaagtttcgaaccaaatcctcaaa

SEQ ID NO: 4 - DNA, 134 bp, Pepper mild mottle virus
  source 1..134: mol_type = other DNA
taggcttgagagagaaaattactagtgtgtcagaaggaggacccgttgaacttacagaagcagtcgttgatgagttcatcgaatcagttccaatggctgacagattacgtaaatttcgcaatcaatctaagaaa

SEQ ID NO: 5 - DNA, 139 bp, Paprika mild mottle virus
  source 1..139: mol_type = other DNA
aaggtttacgagagaaagtgactacagtgtcagaggacagcgctattgaacttacagaggaagttgttgatgagttcatagaggcagtaccgatggcacgtcggttgcaaaatttcaggaaacccaaaaataatattag

SEQ ID NO: 6 - DNA, 134 bp, Bell pepper mottle virus
  source 1..134: mol_type = other DNA
tgggtttgagggagaagattacaagagtaaccgacgccgggcctatggaacttactgaagaagttgttgatgagttcatagagaatgtcccgatggcggcaaggcttgcaagatttcgaaccaaatcctcaaaa

SEQ ID NO: 7 - DNA, 138 bp, Tomato mottle mosaic virus
  source 1..138: mol_type = other DNA
tgggtttgagggagaagattacaagagtggatgacgcaggtcccattgaacttaccgaagaagttgttgatgagttcatggagagtgtgcctatgtcagtcaggcttgctaaatttcgaaccaaatcctcaaaaagag

SEQ ID NO: 8 - DNA, 135 bp, Odontoglossum ringspot virus
  source 1..135: mol_type = other DNA
tcggactgagagagaagattttgaacgtaacagaaggagggcccaccgaacttactgaagcagttgttgatagattcgtggagaaagttcctatggctgctaggctcaagtcttttcgctctgtcaacaaaaaga

SEQ ID NO: 9 - DNA, 201 bp, Obuda pepper virus
  source 1..201: mol_type = other DNA
agggtctaagagagaaggtgactgccgtgtccgaagacgacgctatagaactcacagaagaggttgttgatgagtttatagaagccgtaccgatggcgcgacgtttgcagaacttgagaaaacccaagtacaacaaagaaaaagaaaataaaaatttgaataataaaaatagtataggagtttccaaacctgtcggtttag

SEQ ID NO: 10 - DNA, 136 bp, Rehmannia mosaic virus
  source 1..136: mol_type = other DNA
tgggtttgagggagaaaatcacaactgtgaaagatggaggacccatggaactcaccgaagaagtggtagacgagttcatggaagacgttccaatgtctgtcagacttgcgaagtttcgatctcgaaccggaaaaaa

SEQ ID NO: 11 - DNA, 134 bp, Brugmansia mild mottle virus
  source 1..134: mol_type = other DNA
aaggattgcgtgaaaggatcacgaatgttgccgaaggcggttcacttgagctcactgaagaagttgttgagagctttgtgaatgacgtccctatggcagtacgactgaaccatttacgtaatggaaacaaaaaa

SEQ ID NO: 12 - DNA, 134 bp, Yellow tailflower mild mottle virus
  source 1..134: mol_type = other DNA
ccggtctgagagagaaagtaacttccgtgtcagaagggtctccgattgaactcacagaagatgttgtagatgagtttttcgagagtgtccctatggctcgtaggttgcagaacttgaggaataggcgaggaaat

SEQ ID NO: 13 - DNA, 137 bp, Tropical soda apple mosaic virus
  source 1..137: mol_type = other DNA
ttggactgagggagaaaattacaaatgtctcagacggaggacccgtcgaacttacagaagaagttgttgatgagttcgtcgaatcagttcctatggctgagagattacgtaaatttcgaggacggtccaacaaaaag

SEQ ID NO: 14 - DNA, 432 bp, Cucumber green mottle mosaic virus
  source 1..432: mol_type = other DNA
taccctcgtctgtcgtagatattaattctagattcccagatgcgggtttttacgctttcctcaacggtcctgtgttgaggcctatcttcgtttcgcttctcagctccacggatacgcgtaatagggtcattgaggttgtagatcctagcaatcctacgactgctgagtcgcttaacgctgtaaagcgtactgatgacgcgtctacagccgctagggccgagatagataatttaatagagtctatttctaagggttttgatgtttacgatagggcttcatttgaagccgcgttttcggtagtctggtcagaggctaccacctcgaaagcttagtttcgagggtcttctgatggtggtgcacaccaaagtgcatagtgctttcccgttcacttaaatcgaacggtttgctcattggtttgcggaaacctctcac

SEQ ID NO: 15 - DNA, 347 bp, Cucumber fruit mottle mosaic virus
  source 1..347: mol_type = other DNA
tttttgtccttattatgctttgtatgatctgttggtgtcagcccaaggtggagccctgcaaacgcaaaatggtaaagacattttgcgtgactccataaatgggttgttaacgacagttgcgtctcctaggagtcggttccctgcggaagggttctttgtctggtcccgtgagtcgcgcattgctgctatattagattctctgctttcggcgttggattcaagaaatagggctattgaagttgaaaacccttctaatccttcgaccagtgaagctttgaatgctactaagcgcaatgacgacgcgtctactgctgcgcacaacgacattcctcagctgatttcagctt

SEQ ID NO: 16 - DNA, 297 bp, Kyuri green mottle mosaic virus
  source 1..297: mol_type = other DNA
tgttaacttctgttgcgtctctcaattcacgttttcctgctaatgagtttttcgtgtggtctcgtgagtcgcgcattgctgccataatcgattcgttgttatccgctttggattctagaaatagggctatcgaagttgaaaacccttctaatccttctaccggagaagctctgaatgcgaccaagcgcaatgacgacgcgtctacagccgcgcacaacgacattcctctgcttttagcagctctgaatgacggtgtgggcgtttttgatagtgcgtcttttgagtcagctttcggtc

SEQ ID NO: 17 - DNA, 335 bp, Zucchini green mottle mosaic virus
  source 1..335: mol_type = other DNA
tgctgtcttctgttgcgtcacccacttcacagtttccttccggtgtgttttatgtgtggtctcgtgagtcgcgcattgctgctttgatcgattctctcttcggtgctttggattcaagaaatagggctattgaagttgaaaacccttctaatccatcgactggcgaagctttgaacgcggttaagcgcaatgacgacgcgtctacagccgctcacaacgacattcctcagattttatctgctctgaatgaaggtgcgggcgtttttgatagagcgtcttttgaatctgcttttggtctcgtgtggaccgcaggttcgtctacctcgtcttgaggc

SEQ ID NO: 18 - DNA, 238 bp, Cucumber mottle virus
  source 1..238: mol_type = other DNA
tcttttcctcgcccgtgagtcctaccgtcagatttcctgacggagttttttatgtgtttttaggtaatcctgttttggatccgctttttaaagctctgttacagtcgttggatacaagaaatagggtcatagaggttgataacccttctaatcctacgactgctgagtctttaaacgctgtccagcgtactgacgattctactgtcagttcgcgtgtgggtttaataaacttgcgtgc

SEQ ID NO: 19 - DNA, 238 bp, unidentified
  source 1..238: mol_type = other DNA
ttttcacctctcctgtgagtccgaccgttagatttcctgacggtccgtttttcattttcttagggaatcctgtgttggatccgctttttaaagctcttctgcagtcgctggatacaagaaatagggttattgaggttgacaatccttctaatcctactactgcggaatctttgaacgcgattcagcgtactgacgactcttccgtcagttcgcatgtcggtctagttaaccttcgcgc

SEQ ID NO: 20 - DNA, 246 bp, Turnip vein-clearing virus
  source 1..246: mol_type = other DNA
agggtttgagggaaaaggtcgtcgcaataaatgatccggacgtcgaaggtttcgaaggtgtggttgacgaattcgtcgattcggttgcagcatttaaagcggttgacaatttcaggaagaggaaaaagaaggttgaagaaagggatgtagtaagtaagtataaatatagaccggagaaatacgccggtcctgattcgtttaatttaaaagaagaaaatgtcttacaacattacaaacccgaatcag

SEQ ID NO: 21 - DNA, 246 bp, Ribgrass mosaic virus
  source 1..246: mol_type = other DNA
agggtttgagagaaaagatcatcgcgataagtgatccggacgtcgaaggtttcgaaggagtggttgacgatttcgttgattcggtcgaagcatttagagcggttgataatttcaggaaaaagaaaaggaagataggagaaaaggaagcggtaagtaggaataagtacagaccggagaaacacgccggtcctaattcgttatatattaaagaagaaaatgtcttacaacatcacgagctcgaatcag

SEQ ID NO: 22 - DNA, 246 bp, Wasabi mottle virus
  source 1..246: mol_type = other DNA
agggtttaagagaaagagtcatcgctgtagatgatccgaacgttgagggtttcgaaggtgtagttgacgaattcatcgattcggttgcagcatttaaagcggttgacaatttcaggaaaaagaaaaggaagattggaggaagggatgtgattagtaagtataagtatagaccagagaagtacgccggtcctgattcgttacttaataaagaagaaaatgtcatacaacatcacgaactcgaatcag

SEQ ID NO: 23 - DNA, 249 bp, Youcai mosaic virus
  source 1..249: mol_type = other DNA
aaggtttgagggaaaaagtcatcgctgtgaatgatccgaacgtcgaaggtttcgaaggtgtggttgacgatttcgtcgattcggttgctgcattcaaggcgattgacagtttcaggaagaaaaagaaaaggattggaggaagggatgtaaatagtaataagtatagatatagaccggagagatacgccggtcctgattcgttacaatataaagaagaaaatggtttacaacatcacgagctcgaatcag

SEQ ID NO: 24 - DNA, 258 bp, Streptocarpus flower break virus
  source 1..258: mol_type = other DNA
agggtttgcgtgaaaggcttaataatgtgggagatccaaatgttgaagtttcagaagttgtcgttgatgagttcgtggactcgatttccgcttcacagtcgttaagccgtgctcgtaataaatacgttcgtggtaatggtaaggttgggaataatagtggtggttttagtaagtataatcgtcatcagccggagaggttcgccggcaaggctatgtataattctaaaaatgtcgtacgtggtggtacttccgaaccaa

SEQ ID NO: 25 - DNA, 333 bp, Rattail cactus necrosis-associated virus
  source 1..333: mol_type = other DNA
tgcttttatgacaggatcttacccaacaattcgactgtgctcaacgactatgacagtttcaccttgagagtgagagacattcatctcaacttggacgattgtagactcgacctgtcaaaggacgatccagcaatctgtcggaggcagtcgggttatctgcgtcccgttcttagaaccggtacggagagacctcgacagcccgggctcattgagaatgtcttagctcttatcaagagaaatttcaatgcacctcatcttcttggaactgtagacgtcgatgcaatggccgacaccgtagtggataagttttttaaaattttcttccctgatggt

SEQ ID NO: 26 - protein, 159 aa, Tobacco mosaic virus
MSYSITTPSQFVFLSSAWADPIELINLCTNALGNQFQTQQARTVVQRQFSEVWKPSPQVTVRFPDSDFKVYRYNAVLDPLVTALLGAFDTRNRIIEVENQANPTTAETLDATRRVDDATVAIRSAINNLIVELIRGTGSYNRSSFESSSGLVWTSGPAT

SEQ ID NO: 27 - protein, 159 aa, Tobacco mild green mosaic virus
MPYTINSPSQFVYLSSAYADPVQLINLCTNALGNQFQTQQARTTVQQQFADAWKPVPSMTVRFPASDFYVYRYNSTLDPLITALLNSFDTRNRIIEVDNQPAPNTTEIVNATQRVDDATVAIRASINNLANELVRGTGMFNQAGFETASGLVWTTTPAT

SEQ ID NO: 28 - protein, 159 aa, Tomato mosaic virus
MSYSITSPSQFVFLSSVWADPIELLNVCTNSLGNQFQTQQARTTVQQQFSEVWKPFPQSTVRFPGDVYKVYRYNAVLDPLITALLGAFDTRNRIIEVENQQSPTTAETLDATRRVDDATVAIRSAINNLVNELVRGTGLYNQNTFESMSGLVWTSAPAS

SEQ ID NO: 29 - protein, 157 aa, Pepper mild mottle virus
MAYTVSSANQLVYLGSVWADPLELQNLCTSALGNQFQTQQARTTVQQQFSDVWKTIPTATVRFPATGFKVFRYNAVLDSLVSALLGAFDTRNRIIEVENPQNPTTAETLDATRRVDDATVAIRASISNLMNELVRGTGMYNQALFESASGLTWATTP

SEQ ID NO: 30 - protein, 161 aa, Paprika mild mottle virus
MPYTVSSPNQLVYFGSVWADPIALIDLCTVSLGNQFQTQNARTTVQQQFSDLFKTVPTRTIRFSDGENGFRVFRYNSTLDPLITALLNSFDTRNRIIETENPANPNTAEIASATQRVDDATVSIRACINNLMNELARGTGMLNTASFETVSNLTWTTAATT

SEQ ID NO: 31 - protein, 160 aa, Bell pepper mottle virus
MSYTVNSPSQLVYLSSAWADPTDLLNLCTNSLGNQFQTQQARTTVQQQFSDVWKPTPQAGVRFPASGFKVYRYNAVLDPLITALLGTFDTRNRIIEVENQQNPTTAETLDATRRVDDATVAIRSAINNLANELVRGTGMYNQTSFESMAGLTWTTTPPSG

SEQ ID NO: 32 - protein, 159 aa, Tomato mottle mosaic virus [sequence omitted]

SEQ ID NO: 33 - protein, 158 aa, Odontoglossum ringspot virus
MSYTITDPSKLAYLSSAWADPNSLINLCTNSLGNQFQTQQARTTVQQQFADVWQPVPTLTSRFPAGAGHFRVYRYELILEPLITFLMGTFDTRNRIIEVRNPQNPTTTETLDATRRVDDATVAIRSAINNLLNELVRGNGMYNQVSFETMSGLTWTSS

SEQ ID NO: 34 - protein, 161 aa, Obuda pepper virus
MPYTVTSPSQLVYFGSVWADPITFIDLCTVALGNQFQTQNARTTVQQQFSDLFKTVPTRTNRFNDGENGFRVFRYNSTLDPLISALMNSFDTRNRIIEVDNPANPNTSEVASATQRVDDATVNIRACINNLMNELVRGTGMMNTASFETVSNLTWTTTTTT

SEQ ID NO: 35 - protein, 159 aa, Rehmannia mosaic virus
MSYTIATPSQFVYLSSAWADPVELINLCTNALGNQFQTQQARTVVQRQFSEVWKPSPQVTVRFPANDFKVYRYNAVLDPLVTALLGAFDTRNRIIEVENQANPTTAETLDATRRVDDATVAIRSAINNLVVELIRGTGSYNRSAFESSSGLVWTSGPAT

SEQ ID NO: 36 - protein, 159 aa, Brugmansia mild mottle virus
MAYTITAPNQIVYLGVAYADPILLMNLCTTSQGNQFQTQNARTTVQQQFADIWKAVPAVNIRFPENGFLVYRYNAVLDQLVTSLLNSFDTRNRIIEVENPPNPTNGEIMSATQRVDDATVNIRASITNLMNELVRGTGFLNRSSFESTSGLTWSTAPTT

SEQ ID NO: 37 - protein, 158 aa, Yellow tailflower mild mottle virus
MSYAITSPKQFAYLTNAYADPIALISLCNNALGNQFQTQNARTTVQQQFNDIWKELPTQISRFPVGIYRVYRFDSTIDPLITSVLNSFDTRNRIIETENPANPSTTEVVNATQRVDDATVNIRSSINNLCNELIRGTGFLNQATFEEASQLTWTARTT

SEQ ID NO: 38 - protein, 160 aa, Tropical soda apple mosaic virus
MSYTISNPNQLVYLASVWADPTELLNLCTSALGNQFQTQQARTTVQQQFSDVWKTVPATNIRFPNAGFKVYRYNAVLDSLITALLGSFDTRNRIIEVENPQNPTTAETLDATRRVDDATVAIRSSINNLMNELVRGTGMYNQAQFESVSGLTWATTATSS

SEQ ID NO: 39 - protein, 161 aa, Cucumber green mottle mosaic virus
MAYNPITPSKLIAFSASYVPVRTLLNFLVASQGTAFQTQAGRDSFRESLSALPSSVVDINSRFPDAGFYAFLNGPVLRPIFVSLLSSTDTRNRVIEVVDPSNPTTAESLNAVKRTDDASTAARAEIDNLIESISKGFDVYDRASFEAAFSVVWSEATTSKA

SEQ ID NO: 40 - protein, 162 aa, Cucumber fruit mottle mosaic virus
MSYSTSGLRSLPAYTKSFCPYYALYDLLVSAQGGALQTQNGKDILRDSINGLLTTVASPRSRFPAEGFFVWSRESRIAAILDSLLSALDSRNRAIEVENPSNPSTSEALNATKRNDDASTAAHNDIPQLISALNDGAGVFDRASFESQFGLVWTAASSSTSK

SEQ ID NO: 41 - protein, 161 aa, Kyuri green mottle mosaic virus
MSYSTSGIRSLPAFAKSFYPFYDVYNLLVSAQGGALQTQNGKDILRESLTGLLTSVASLNSRFPANEFFVWSRESRIAAIIDSLLSALDSRNRAIEVENPSNPSTGEALNATKRNDDASTAAHNDIPLLLAALNDGVGVFDSASFESAFGLTWTASATSSK

SEQ ID NO: 42 - protein, 161 aa, Zucchini green mottle mosaic virus
MPYSTSGIRSLPAFSKSFFPYLELYNLLITNQGAALQTQNGKDILRESLVGLLSSVASPTSQFPSGVFYVWSRESRIAALIDSLFGALDSRNRAIEVENPSNPSTGEALNAVKRNDDASTAAHNDIPQILSALNEGAGVFDRASFESAFGLVWTAGSSTSS

SEQ ID NO: 43 - protein, 162 aa, Cucumber mottle virus
MAYSPITPTNLSLFSSNYVPFTEFYNYLVTAQGEAFQTQQGRDSVRDSLSGFFSSPVSPTVRFPDGVFYVFLGNPVLDPLFKALLQSLDTRNRVIEVDNPSNPTTAESLNAVQRTDDSTVSSRVGLINLRAAITQGNGVVNRSIFESSNGLTWATSGSSSSK

SEQ ID NO: 44 - protein, 162 aa, unidentified
MAYTPITPTNLPLFSSNYVPYTEFYNYLVSAQGEAFQTQQGRDAVRTTLSGFFTSPVSPTVRFPDGPFFIFLGNPVLDPLFKALLQSLDTRNRVIEVDNPSNPTTAESLNAIQRTDDSSVSSHVGLVNLRAAIAQGNGVVNRSIFESSSGLTWATSSASTSK

SEQ ID NO: 45 - protein, 157 aa, Turnip vein-clearing virus
MSYNITNPNQYQYFAAVWAEPIPMLNQCMSALSQSYQTQAARDTVRQQFSNLLSAVVTPSQRFPDTGSRVYVNSAVIKPLYEALMKSFDTRNRIIETEEESRPSASEVANATQRVDDATVAIRSQIQLLLSELSNGHGYMNRAEFEALLPWTTAPAT

SEQ ID NO: 46 - protein, 157 aa, Ribgrass mosaic virus
MSYNITSSNQYQYFAAVWAEPTPMLNQCVSALSQSFQTQAGRDTVRQQFSNLLSAIVAPNQRFPDTGFRVYVNSAVIKPLYEALMKSFDTKNRIIETEEESRPSASEVANATQRVDDATVAIRSQIQLLLNELSNGHGYMNRAEFEAILPWTTAPAT

SEQ ID NO: 47 - protein, 157 aa, Wasabi mottle virus
MSYNITNSNQYQFFAAVWAEPIAMLNQCISALSQSYQTQAARDTVRQQFSNLLSAIVTPNQRFPETGYRVYVNSAVLKPLYEALMKSFDTRNRIIETEEESRPSASEVANATQRVDDATVAIRSQIQLLLSELSSGHGLMNRAEFEVLIPWATAPAK

SEQ ID NO: 48 - protein, 157 aa, Youcai mosaic virus
MVYNITSSNQYQYFAAMWAEPTAMLNQCVSALSQSYQTQAARDTVRQQFSNLLSAIVTPNQRFPEAGYRVYINSAVLKPLYESLMKSFDTRNRIIETEEESRPSASEVANATQRVDDATVAIRSQIQLLLNELSNGHGLMNRAEFEVLLPWATAPAT

SEQ ID NO: 49 - protein, 157 aa, Streptocarpus flower break virus
MSYVVVLPNQLQFFTNAWADPIQLMNLCSASLSQIFQTQAARDAVREQFGNTLRSVVTQTTRFPEAGFQVYINDAALKPLWENLLKSFDTKNRILETEEETRPSTAEVLNATQRVDDSTTAIRGALQRLSDELNRGSGYMNRTSFETILLWSAATAK

SEQ ID NO: 50 - protein, 170 aa, Rattail cactus necrosis-associated virus
MPYINVQPKDFVYLTRSWVDPQRLIQFLSDMQTQAFQAQQSRTQLLNELSTMVVYGPTKSDRFPIDTYLINITKGGLSAYWFGLTQSADTKDRVFEVSEARAVTNAESKLATQRVDDATVAIRNAIKSTLSYLIAGEDIYSRTSFEAALGWIWQENLPPPPQTAASDSRT

SEQ ID NO: 51 - protein, 268 aa, Tobacco mosaic virus
MALVVKGKVNINEFIDLTKMEKILPSMFTPVKSVMCSKVDKIMVHENESLSEVNLLKGVKLIDSGYVCLAGLVVTGEWNLPDNCRGGVSVCLVDKRMERADEATLGSYYTAAAKKRFQFKVVPNYAITTQDAMKNVWQVLVNIRNVKMSAGFCPLSLEFVSVCIVYRNNIKLGLREKITNVRDGGPMELTEEVVDEFMEDVPMSIRLAKFRSRTGKKSDVRKGKNSSNDRSVPNKNYRNVKDFGGMSFKKNNLIDDDSEATVAESDSF

SEQ ID NO: 52 - protein, 256 aa, Tobacco mild green mosaic virus
MAVSLRDTVKISEFIDLSKQDEILPAFMTKVKSVRISTVDKIMAVKNDSLSDVDLLKGVKLVKKGYVCLADLVVSGEWNLPDNCRGGVSVCIVDKRMKRSKEATLGAYHAPACKKNFSFKLIPNYSITSEDAEKHPWQVLVNIKGVAMEEGYCPLSLEFVSICVVHKNNVRKGLRERILSVTDGSPIELTEKVVEEFVDEVPMAVKLEKVPENKKEMVGNNVNNKKINNSGKKGFKIEEIEDNVSDDESIASSSTF

SEQ ID NO: 53 - protein, 264 aa, Tomato mosaic virus
MALVVKGKVNINEFIDLSKSEKLLPSMFTPVKSVMVSKVDKIMVHENESLSEVNLLKGVKLIEGGYVCLVGLVVSGEWNLPDNCRGGVSVCMVDKRMERADEATLGSYYTAAAKKRFQFKVVPNYGITTKDAEKNIWQVLVNIKNVKMSAGYCPLSLEFVSVCIVYKNNIKLGLREKVTSVNDGGPMELSEEVVDEFMENVPMSVRLAKFRTKSSKRGPKNNNNLGKGRSGGRSKPKSFDEVEKEFDNLIEDEAETSVADSDSY

SEQ ID NO: 54 - protein, 257 aa, Pepper mild mottle virus
MALVVKDDVKISEFINLSAAEKFLPAVMTSVKTVRISKVDKVIAMENDSLSDVNLLKGVKLVKDGYVCLAGLVVSGEWNLPDNCRGGVSVCLVDKRMQRDDEATLGSYRTSAAKKRFAFKLIPNYSITTADAERKVWQVLVNIRGVAMEKGFCPLSLEFVSVCIVHKSNIKLGLREKITSVSEGGPVELTEAVVDEFIESVPMADRLRKFRNQSKKGSNKYVGKRNDNKGLNKEGKLFDKVRIGQNSESSDAESSSF

SEQ ID NO: 55 - protein, 269 aa, Paprika mild mottle virus
MSSKSIVNIEEFINMSKAEEVLPAALTRMKSVRISTVDKIMATDNDNISEVDLLKGVKLIKNGYVCLVGLVVSGEWNLPDNCRGGVSVCLIDKRMQRHNEATLGSYTAKASKKNFSFKLIPNYSITSQDAERRPWEVMVNIRGVAMEEGWCPLSLEFVSVCIVHKNNVRKGLREKVTTVSEDSAIELTEEVVDEFIEAVPMARRLQNFRKPKNNISKNFVNKGSSKPRNIPKLNEDKVFKLEKGLKGVKGMTNASRDDSSSEISSDSFN

SEQ ID NO: 56 - protein, 278 aa, Bell pepper mottle virus
MAIVVKDKVNVNDFINLSNSEKYLPSNSEKYLPSLMTPVKSVRISKVDKVLARENETLSEVDLLKGVKLIEGGYICLAGLVVTGEWNLPDNCTGGVSVCLVDKRMERASEATLGSYYTGAAKKRFQFKVTPNYSVTTDDAKKNIWQVLVNIKGVRMSAGFCPLSLEFVSVCIVFKNNIKLGLREKITRVTDAGPMELTEEVVDEFIENVPMAARLARFRTKSSKTGPKKFVRNSRDSKVRSNNLNRGVRPKFEEEGIVSDKLINDESESIDADSDSYL

SEQ ID NO: 57 - protein, 268 aa, Tomato mottle mosaic virus
MALTVSGKVRISEFIDLSKSERLLPSMFTHVKSVSVSKVDKVMVNEEDSLSEVNLLKGVKLIDGGYVCLAGLVVSGEWNLPDNCRGGVSICLVDKRMQRADEATLGSYYTGAAKKRFQFKIVPNYAITTKDAERNIWQVLVNIRNVKMAGGFCPLSLEFVSVCIVYKNNIKLGLREKITRVDDAGPIELTEEVVDEFMESVPMSVRLAKFRTKSSKRGPKHNSNNTNERKGRSNFRKKQDQESYGVSDSLDNLIEDDTETSVAGSDSY

SEQ ID NO: 58 - protein, 303 aa, Odontoglossum ringspot virus
MGRLRFVVLLSIFPIKTFSEPCYTMALVLRDSIKISEFINLSAFEKLLPSALTAVKSVRIPKVDKIISYENDTLSDIDLLKGVKLVENGYVCLAGLVVTGEWNLPDNCKGGVSICLVDKRMKRANEATLGSYHTSACKKRFTFKIIPNYSVTTADALKGIWQVMTNIRGVEMEKGFCPLSLEFVSICVVYLNNIKLGLREKILNVTEGGPTELTEAVVDRFVEKVPMAARLKSFRSVNKKKPSNSSKFVNGKSRLNSRNKLNYENGDSDVGTSVVDDIVVGNGVSDIRIDDDCESFDAQSESY

SEQ ID NO: 59 - protein, 274 aa, Obuda pepper virus
MSKAIVKIDEFIKLSKSEEVLPSAFTRMKSVRVSTVDKIMAKENDNISEVDLLKGVKLVKNGYVCLVGLVVSGEWNLPDNCRGGVSICLIDKRMQRHNEATLGSYTTKASKKNFSFKLIPNYSITSQDAERRPWEVMVNIRGVAMSEGWCPLSLEFVSVCIVHKNNVRKGLREKVTAVSEDDAIELTEEVVDEFIEAVPMARRLQNLRKPKYNKEKENKNLNNKNSIGVSKPVGLERNKVRSVVRKGVRSDSSLGVTDMSQDGSSSEISSDSFI

SEQ ID NO: 60 - protein, 267 aa, Rehmannia mosaic virus
MALVVKGKVNIGEFIDLTKTEKLLPSMFTPVKSVMCSKVDKVMVHENESLSEVNLLKGVKLIENGYVCLAGLVVTGEWNLPDNCRGGVSVCLVDKRMERADEATLASYYTAAAKKRFQFKVVPNYAITTHDAMKNVWQVLVNIRNVKMSAGFCPLSLEFVSVCIVYRNNIKLGLREKITTVKDGGPMELTEEVVDEFMEDVPMSVRLAKFRSRTGKKNNVKKVKFEGVDRSVPKMNKGKSRNNGGVFERNIFIDNDSETNVAEPDSF

SEQ ID NO: 61 - protein, 271 aa, Brugmansia mild mottle virus
MTLSIRDSFKIDEFINLSKVEKAVPALFSRVKTVRVSTVDKIMATKNDSLSDVDLLKGVKLVNNGYVCLVGLVVSGEWNLPDNCKGGVSVCLVDKRMKRANEATLGSYHSRACKKNFSFKLIPNYSITTADAEKQPWQVLVNIRGVQMEQGYCPLSLEFVSVCIVHKNNVRKGLRERITNVAEGGSLELTEEVVESFVNDVPMAVRLNHLRNGNKKEGFSKGKYVNNNAKERSVNKFVKKSVNGKGGLKVKEISTSVEDYNSSEVSSDSFI

SEQ ID NO: 62 - protein, 266 aa, Yellow tailflower mild mottle virus
MAIALRDTVKINEFINLSKTEEILPAMFTRMKSVRISTVDKVVAKENDSVSEVDLLKGVKLVKNGYVNLVGLVVSGEWNLPDNCRGGVSVCLVDRRMTRHSEATLGSYTAPACKKNFSFKLIPNYSVTTADAERRPWEVMVNIKGVAMAEGWCPLTLEFVCVCIVHKTNVRTGLREKVTSVSEGSPIELTEDVVDEFFESVPMARRLQNLRNRRGNINRNKSQVYKKKNKNNIGDALKERIDEVKDVENKRYDNDDYSIEESSDSY

SEQ ID NO: 63 - protein, 256 aa, Tropical soda apple mosaic virus
MALVVKDDVKISEFINLSTSEKFLPAAMTSVKSVRVSKIDKVIATENDSLSDVDLLKGVKLIEEGYVCLAGLVVSGEWNLPDNCRGGVSVCLVDKRMLRHDEATLGSYKTGAAKKRFAFKLIPNYSVTTADAKRNIWQVLVNIKGVAMEKGFCPLSLEFVSVCIVHKTNIKLGLREKITNVSDGGPVELTEEVVDEFVESVPMAERLRKFRGRSNKKSNKFVEKNNNKRGDKGGKLLKKIDNETETESSDAESSSY

SEQ ID NO: 64 - protein, 264 aa, Cucumber green mottle mosaic virus
MSLSKVSVENSLKPEKFVKISWVDKLLPNYFSILKYLSITDFSVVKAQSYESLVPVKLLRGVDLTKHLYVTLLGVVVSGVWNVPESCRGGATVALVDTRMHSVAEGTICKFSAPATVREFSVRFIPNYPVVAADALRDPWSLFVRLSNVGIKDGFHPLTLEVACLVATTNSIIKKGLRASVVESVVSSDQSIVLDSLSEKVEPFFDKVPISAAVMARDPSYRSRSQSVGGRGKRHSKPPNRRLDSASEESSSVSFEDGLQSDHT

SEQ ID NO: 65 - protein, 258 aa, Cucumber fruit mottle mosaic virus
MSISKVGVRNALKPEEFVKITWVDKLLPDAFTILKYLSITDYSVVQSKDYEHLIPVDLLRGVDFSKSKYVTLVGVVISGVWTIPENCAGGATVALVDTRMSLVSEGTICKFSVSAASRDFTVKLIPNYYVTAADASSKPWSLFVRISGVRIKDGFSPLTLEIASLVATTNSILKKGLRVSVIESVVGSDASVSLDTLSEKVQPFFDSVPITASVVSRDRSYVSKGRPPSRSGPVSRKSKSKSEAESFSDSGASEPLSS

SEQ ID NO: 66 - protein, 262 aa, Kyuri green mottle mosaic virus
MSVSSVGVKNALKPQEFVKLSWVDKVLPDMFTVFRYLSVTDYSVIKSRDSECLIPVDLLRGVDLSKSKYVTLVGVVISGVWTIPENCAGGATVALVDTRMSMVDEGTICKFSVAASTRDFMVKLIPNYYVTASDASSKPWSIFVRVSGVRIKEGFSPLTLEIASLVATTNSILKKGLRVSVLESVVGSDASINLDSVSDKVQPFFDSVPITAAVIARDRSYVSKSGPSRAVRPRPQSKSGKKGDANPAESMSDGDAYEPPRL

SEQ ID NO: 67 - protein, 261 aa, Zucchini green mottle mosaic virus
MSVSKLGVKNVLKPQEFVKLNWVDKVLPDMFTVFRYLSVTDYSVIKSRDSECLIPVDLLRGVDLSKSKYVTLVGVVISGVWTIPENCAGGATVALVDTRMSMVDEGTICKFSVAASARDFMVKLIPNYYVTATDASSKPWSIFVRVSGVRIKEGFSPLTLEIASLVATTNSILKKGLRVSVLESVVGSDASVNLESASEKVQPFFDSVPITAAVISRDRSYVSKSGFNRAVRSKPPSKGGKKFGDSAESLSEDSASELPGL

SEQ ID NO: 68 - protein, 262 aa, Cucumber mottle virus
MSISNLSVESQLKPSNFVKLSWVDKLLPDYFSILRFLSVTDHSVIKAREYESFLPVELLRGVDLTKHKYVTLLGVVISGVWTIPEGCSGGATVGLVDTRMERVVEGTVCKFSVPASVREFNVRFIPNYSITAADAARHPWSLFVRLKGVNIKDSFSPLTLEIAALVATTNSIIKKSLKAIVSDVVVGSDAAVAIADRDSQVNSFFDSVPITKSVVNFDKSYKSRVPKKDSSGGSGKVKRSTGTSGPADTEFSDDGLLSNHSD

SEQ ID NO: 69 - protein, 262 aa, unidentified
MSISNLSVESQLKPSNFVKLSWVDRLLPDYFSILRFISVTDHSVVKAREYESFLPVELLRGVDLTKHKYVTLLGVVISGVWTIPEGCSGGATIGLVDTRMERVSEGTVCKFSVPASVREFNVRFIPNYSITASDAARHPWSLFVRLKGVSIKDSFSPLTLEIAALVATTNSIIKKSLKAVVSSVVVGSDAAVAIEDKDSSVNSFFDSVPITKSVINFDKSYKSKVPRKGSSVVSVKGKAGVGTSGPTDTEFSDYGLHSDHTD

SEQ ID NO: 70 - protein, 267 aa, Turnip vein-clearing virus
MSIVSYEPKVSDFLNLSKKEEILPKALTRLKTVSISTKDIISVKESETLCDIDLLINVPLDKYRYVGILGAVFTGEWLVPDFVKGGVTISVIDKRLVNSKECVIGTYRAAAKSKRFQFKLVPNYFVSTVDAKRKPWQVHVRIQDLKIEAGWQPLALEVVSVAMVTNNVVMKGLREKVVAINDPDVEGFEGVVDEFVDSVAAFKAVDNFRKRKKKVEERDVVSKYKYRPEKYAGPDSFNLKEENVLQHYKPESVPVLRSGVGRAHTNA

SEQ ID NO: 71 - protein, 267 aa, Ribgrass mosaic virus
MSMVSYEPKVNDFLFLTNKEKILPKALTRLKTVSISTKDIISVKESETLCDIDLLIDVPLDKYRYVGILGAVFTGEWLVPDFVKGGVTISVIDKRLVNSKECVIGTYRAAAKSKRFQFKLVPNYFVSTADAKRKPWQVHVRIQDVKIEAGWQPLALEVVSVAMVANNVVMKGLREKIIAISDPDVEGFEGVVDDFVDSVEAFRAVDNFRKKKRKIGEKEAVSRNKYRPEKHAGPNSLYIKEENVLQHHELESVPVLRSGVGRTHTNA

SEQ ID NO: 72 - protein, 267 aa, Wasabi mottle virus
MSTVSYKPKVSDFLSLSRTEEILPKALTRLKTVSVSTKDVISVKESESLCDIDLLVNVPLDKFRYVGILGVVFTGEWLIPDFVKGGVTVSVIDKRLENSKECIIGTYRAAAKDRRFQFKLVPNYFVSVTDAKRKPWQVHVRIQNLKIEAGWQPLALEVVSVAMVTNNVVVKGLRERVIAVDDPNVEGFEGVVDEFIDSVAAFKAVDNFRKKKRKIGGRDVISKYKYRPEKYAGPDSLLNKEENVIQHHELESVPVFCSGMGRAHSDA

SEQ ID NO: 73 - protein, 265 aa, Youcai mosaic virus
MSYEPKVSDFLALTKKEEILPKALTRLKTVSISTKDVISVKESESLCDIDLLVNVPLDKYRYVGVLGVVFTGEWLVPDFVKGGVTVSVIDKRLENSKECIIGTYRAAAKDRRFQFKLVPNYFVSVADAKRKPWQVHVRIQNLKIEAGWQPLALEVVSVAMVTNNVVVKGLREKVIAVNDPNVEGFEGVVDDFVDSVAAFKAIDSFRKKKKRIGGRDVNSNKYRYRPERYAGPDSLQYKEENGLQHHELESVPVFRSDVGRAHSDA

SEQ ID NO: 74 - protein, 288 aa, Streptocarpus flower break virus
MAIVLSKPKVSEFLNLTKAEEILPKFLTRLKTVAISTRDVVSVKGTTDLVDIDLLRDVPVNNWRYVGIVGIVASGEWLLPDNVSGGVAISFVDKRLVDSREAILGTYRAAAVEKRFQFKLIPNYFVSQEDALRRPWQVQVSLKGLKFEEGFSPLTLEFVSVVVCANSVVTKGLRERLNNVGDPNVEVSEVVVDEFVDSISASQSLSRARNKYVRGNGKVGNNSGGFSKYNRHQPERFAGKAMYNSKNVVRGGTSEPTAILHKRMGGSNSIDESLFSVAESDLSDSGCA

SEQ ID NO: 75 - protein, 334 aa, Rattail cactus necrosis-associated virus
MSSLCVSDPAVLLSPELHLKVPQLKSLVQFWKKPFKTCSISMSDVIKVASSNPLSIAVDFSSAMPSGPRNFKYVYILAVVLTGRWHLSESCPGGATFVLYDKRLCGRAEGIYGSFFSKVSASKFQVRFSVGHSMTVNDLLRNPLHLCFSLESVPCQEGYEPLSVEVSSLQLFTDCILEESLSAKLVKYPALCTDNMSVISNVDDVIFKFNSVLNVDNVPNSVKNVVKCNKVFKGRRSRGKWVGSQNEVVVKDGTNVTPHRLIAKDALHQRTTERLRLPDQVMGRPPASDTVSERYADSGFPSTAVSHTTSERTVDDGGLRSDQIGPFPYRYVPY

SEQ ID NO: 76 - DNA, 4759 bp, Arabidopsis thaliana
  source 1..4759: mol_type = genomic DNA
ttcattcatcatcttcctcctctctctcttctctgtatcacccaactaaatcctcacgggattagatccaaagtctcaaactttgatccaaaaacacaaactttgttcaaaagacataaactttgagccaaagtcacaagctttcttggtgaacgatggattacaatccaaatcttcctcctttaggaggaggtggtgttagtatgagaagaagcataagtcgaagtgtaagcagagcaagtaggaacattgaagatatcttctcatctggttcaagaagaacacaatcagtcaacgacgatgaagaagctcttaaatgggctgccattgagaagctaccaacttacagtcgtctccgaaccactctcatgaacgctgtagtcgaagacgatgtttacggtaaccagctcatgagcaaggaggttgatgtaaccaagcttgatggtgaagatcgtcagaagtttattgacatggttttcaaagtagctgagcaagataatgaaaggatcttgactaagctaagaaacaggatcgatagagttggtatcaaacttccaactgttgaagtcaggtacgagcatttgacgattaaagctgattgttacactggtaatagatctcttcctacacttttgaatgttgtgaggaacatgggagagtctgctttaggtatgattggtattcaatttgctaagaaagctcagcttacgattcttaaagatatctctggggttattaaacctggaaggatgacacttttgttgggtcctccttcttctggtaagaccactcttttgttggctttagctgggaaacttgataaatctctacaagtcagtggtgatattacttacaatggttaccaactcgatgagtttgttccgagaaagacctctgcttacattagtcagaacgatcttcatgttggtatcatgactgttaaggagactcttgacttctctgctaggtgtcaaggtgttggtactcgttatgatctgttgaatgagcttgcgaggagagaaaaggacgctggtatattcccggaagccgatgttgatctcttcatgaaagcttctgctgctcaaggtgttaagaacagtctcgtcactgattatactctcaaaattttggggcttgacatttgcaaagacacaatagttggagatgacatgatgagaggtatatctggaggtcagaagaaacgtgtcacaactggtgagatgattgttggacctactaagacactcttcatggacgaaatatccactggtcttgacagttccactactttccaaatcgtcaagtgtctgcaacaaatcgttcacctcaatgaagccacggtgctcatgtctctcctccagcctgctcctgagacttttgatttattcgatgatatcatcttggtgtcggaaggtcagatcgtgtaccaaggaccgagagacaacattcttgagttctttgagagctttgggttcaagtgtcctgagagaaaaggaacagctgatttcctgcaagaggttacttccaagaaagatcaagaacagtactgggtgaacccgaacagaccttatcactacattccggtttcagagtttgccagtagatacaagagtttccatgttgggacgaagatgtctaacgaacttgcagtaccgttcgataagtctcgcggccacaaagcagctcttgtgttcgataagtactctgtctcaaagagggagcttctcaagagctgttgggacaaagagtggctgcttatgcagcgaaacgcgttcttctatgttttcaagactgtccagatcgtcatcattgctgcaatcacgtctacactcttcctgagaaccgaaatgaacacaagaaacgagggtgatgctaatctctacataggagcattgctatttggaatgatcatcaacatgtttaatgggtttgcggagatggctatgatggtttcaagactccctgtgttctacaaacagagggatctcttgttttatccatcctggaccttctcacttcccactttcttgcttgggattccaagctcaatattagaatcgacggcttggatggtggtgacttattactccattggttttgcacctgacgccagccgcttcttcaagcagtttcttctggtgtttctgattcaacaaatggctgcatccctctttaggttgattgcttctgtgtgcagaaccatgatgattgctaatactggtggtgctctcactctacttcttgtgttcttgctcggaggcttccttcttccgaaaggcaagattcctgactggtggggttgggcttactgggtatctcctctcacctatgctttcaacggtctagtagtcaatgaaatgtttgctcccagatggatgaacaaaatggcttcttctaacagcacaataaagcttggaactatggtgcttaatacttgggatgtctaccatcaaaagaactggtactggatttcagttggagccttgctttgtttcacagccctcttcaacattctattcaccttggcacttacctatctcaaccctcttgggaagaaggcaggtttacttccagaagaagaaaatgaagacgctgatcaggggaaagatccaatgcgtagatctttgtctactgcagatgggaacagaagaggagaggtcgcaatggggagaatgagtagggactctgcggctgaagcatcaggtggtgcaggcaataagaaaggaatggttcttcctttcactcctttagctatgtcctttgacgacgtcaaatactttgttgacatgcctggggaaatgagagaccaaggagttacagaaacaagactccaactgcttaaaggtgtgactggtgcatttaggccaggagttttgactgcgcttatgggagtgagtggtgccggtaagactacgcttatggacgttttggccggaaggaaaacaggtggatacattgaaggagatgtgagaatatcaggattcccaaaggttcaagaaacatttgctagaatctcaggatattgtgagcagaccgatattcactccccgcaagtaacagtcagagaatctctgattttctctgctttccttcgtcttcctaaagaagtcggcaaagatgaaaaaatgatgtttgtggatcaagtgatggaattggtagagctggacagtcttagggactccattgttggtttaccgggtgtcacggggctttccacggagcagagaaagagactgacaatcgcggtggagcttgtagccaacccttccatcatctttatggatgagccaacttcagggctagacgctagagcagcggctattgtgatgagggcggtaaggaacacagtggacactggaagaaccgtggtctgcaccattcatcagcctagcattgatatctttgaagcatttgatgaattgatgctgatgaagagaggaggacaagtgatttacgcgggtccattgggtcaaaactctcacaaggtggttgagtactttgaatctttccccggagtgtccaagattccagaaaagtataacccggccacttggatgctcgaagctagctcactcgccgctgagctaaagcttagtgttgactttgctgagttatacaatcaatcagcattgcaccagcgaaacaaagcgttggtaaaagaactaagtgtaccaccagcaggagcatcagatctttactttgctacacaattctcacaaaacacatggggacagttcaaatcatgcttatggaaacaatggtggacgtattggagatctccagactacaatcttgtccgtttcatcttcacattggcaacatctctcttgattggtacagtcttctggcaaatcggaggtaacaggtcgaacgcaggggatctaacaatggtgataggagcattgtatgccgcgattatcttcgtgggaatcaacaactgttcaacagtacaaccgatggttgcagtggaaagaacagtgttctacagagaaagagcagcaggaatgtactcagccatgccatatgccatctctcaagtcacttgtgagcttccctatgtccttattcaaaccgtttactactcactcatcgtctacgccatggttggtttcgaatggaaagccgaaaagttcttctggttcgtcttcgttagctacttctcattcctctactggacttactacggcatgatgactgtttccctcacaccaaaccaacaagtcgcttcgattttcgcctcagcgttttacggtattttcaacctcttctctggtttcttcattccaagacccaaaatcccaaaatggtggatttggtactactggatctgccctgttgcatggaccgtgtatggattgatagtgtcgcagtacggtgatgtggagacacgtatccaagtccttggtggtgctcctgacttaaccgtcaagcaatacattgaggaccattatggtttccaatctgactttatgggaccagtggcggctgtactcatcgctttcaccgtcttcttcgccttcatcttcgccttctgcatcagaactctcaacttccagaccagataaaaccatctctcaaacaacaaagtctctttctttttttgtatcctctgtgttgtttatatgcactataagctttgtatgttctaaatatgtattgtagtgtcataacgaaatttttttgaatatttttatttattgtcttatagatgatgacgaatcggaatcatgtaatataattccacttttttttgtgttta

SEQ ID NO: 77 - DNA, 1642 bp, Arabidopsis thaliana
  source 1..1642: mol_type = genomic DNA
gcttcacgagacaaacgacgaacaacgcaattacgcgttcttatctttctgggtatttcttaattatattactctatataaataaaaatacccagaaacgtaatttcgtcgagttcaaaaattcaattcaaagaataatttctttccataaaaagattgttgtggattaacttctttcttaaaagaatctcatacccgtcgaatcttcttcttcaacctttttctgcgtttttaatattttccctacaaaaagattctcaaaatcgttttacataaacccgatcttgtcaatctccagaaacaaaaaaaaaaaaatggcgatcaagacaaagactagtctaattccaagttgttcatcacctgaggatctaaaacgcgttttgcaaacgctaggttcgagctggggagatgtagttgaagatctggagcgtcttgaggttgttccgttaaaaggagctatgactaacgaggtttatcagattaattggcctactttaaacggtgaagatgttcatcggaaagttcttgttcggatctacggtgacggcgttgaccttttctttaacagaggtgatgaaatcaaaacgtttgagtgtatgtctcatcatggttatggtcctaagcttcttggtcgtttctctgatggtcgtcttgaagaattcatacacgccagaactctttctgcagatgatcttcgtgtagcagaaacatctgatttcatcgctgcgaagctaagagagtttcataagcttgatatgcctggtccaaagaacgttcttctctgggaaagacttaggacttggcttaaggaggctaagaacttggcttcacctatagagatggataagtatcggttggaaggtttggaaaatgaaatcaatttgttggaagagagacttactcgggatgatcaagagattggtttctgtcacaacgatcttcagtatggaaatgtcatgattgatgaagtaaccaatgccattaccatcatagactatgagtattcgagtttcaacccaattgcttatgacattgcaaaccacttttgtgagatggctgctaattaccattcagacactcctcatgttctggactacactctatatccaggagaaggagaaaggagaaggttcattagcacatatcttggctctacagggaatgcaacaagtgataaagaagtagagaggttattgaaagatgcagagagctacactttagcaaaccatatcttctggggactatggggaatcatctcgggacatgtgaacaagattgagttcgattacatggaatatgcaaggcagagatttgaacagtactggcttagaaagcctttgcttcttgaaggatgaagcagattcgcattgaaaagccgatatacaactaaaagtttctgcaattaggtcaaaagaaaaaaagaaaatttagtagactatatgttgctattgttactctcatcagtttgtgtgtttcttcccttctatatagaggtttgttaactctcaaaacagttaaattgagtaaaacttgttctaaacaaagtattatatgataatagaagaagcaccagtggtctagtggcatgatagtaccctgccacggtacagacccgggttcaattcccggctggtgcaattta

SEQ ID NO: 78 - DNA, 1043 bp, Arabidopsis thaliana
  source 1..1043: mol_type = genomic DNA
agtttcaaattagtaaacgataaagtagatgataattaaattcatgtcatagccatgaacgaatgttatgttaaaaaaatttcatgtaagtaaattctttggagttcgattcttcttttgtccttacacaatcaaagatttttctttcaactttttttacttaacagcattaactctttctcagatcttcaattgttttcctaaacgaaattatcattaaattgtttaaaaaatacacatttaatataacatatatcataacaagatatattatatttatgaaaaagagatgtagtactacagcatatggtggcaaacaaacccactaaattcagtaaaatggaacccaccaaatttatctataaataagtccccaaacctctcccccaaaaatgcaacaacactcatctttcccaatataagtttttaccaaacaacaacttttgttttgcctttcctcaaaacataattttgtcttattttctaaaccggtaaaagatgtcgctagctatcgcagaagtttacacggtgaggaagtttcacagagagagtatgaagaaaccggccaaacagacggttaccggcgagggagatgaaaagattggcggaggaagtttcaaggaggcgccggtgaagtcaggtgggtgtagaagattcggacggtggttttttgggaagccgggaatgaagaaaagctctgctaaagtttcggatcccatggcgattgagtgatgaagaagaaattaaaacttttctcttctttgccttttttttttttctttctttattttgttttattttcattggtctttttttaatggctttttctagtgtcttctctttttctttattgggtgattttataaatagtcggtaaacattgtacaatatgaactacaaaaatatgagaaaatctatatatgtatgtagaatggatgtattccctaaataccacagctagtttgataagttttatgccaaaccaactaaacttgtatgccacgatatttcgtatttcagaaaatcgaaaattgttatttttt

SEQ ID NO: 79 - DNA, 1428 bp, Arabidopsis thaliana
  source 1..1428: mol_type = genomic DNA
acaaaaaccatttgaattttctttcttcttcaaaagttcgaaacttttttttttccggcaatggagggactagttccggtacagagacttccaattaaagtggcttcaccttctctgtatcggtgtaacaattctgtctcaatcagacgttcaatttcaggttttgccatggacaggaagataaactttagggctccgtcgcaattctcgatccgagctcaacagtcggatttgaaggaaagcttagctgtgtcttcttcatcagtagaggataaaggaaatgttcttagaatcaaggaatgggaagtagagatgtatcaggaggaattagctattagtcaaggtattaggataaggagaaaaccaccaagtaaggctcctttgggatactctggaccatttgagttgagattgcataacaatgatgctgattctcctcgtaatatcttggaggagatcacatggtacaaagacgtagaagtttcccggatgaaggagctaaatccgcttgacgtgctgaagaaagctgtagaggatgctcctcctactagggattttgttggggctcttaggatggctcataaaagaactggcttccctggcttgatagctgaggttaagaaggcttctccaagtagaggaatcttaaaagagaattttgacccggtcgagattgctcaagcttatgaaaaaggcggagcagcatgcctcagcgttttgacagaccagaagtatttccagggaggctttgaaaacttggaagcaataaggagcgctggtgtgaagtgtccactattatgcaaagagtttgttgtagatccatggcagatctactatgctcggactaaaggcgcagatgcagtactgcttattgctgctgtattggctgacctagaaataaccttcttgcttaagatttgcaagaagcttagcttggctgcccttgttgaggtacatgatgagagagagatgggtcgtgtacttggaatagaaggaatcgagcttgttggcatcaataaccgaagtcttgaaacatttgaagtggacatcagtaatacaaagaagcttcttgaaggagagcatggtagacaaatccgtgagagagacatgattgtggttggcgaatctggtctgtttacaccagatgacattgcctatgtacaagcagccggagtcaaagcagttttggttggagaatccattgtgaagcagaacgaccctgagaaaggaatagctggactttttggcaggaacatttctcatacttagagaccatatcataatacatctccaaatacgtttcctagtacatttgttttgtatcttgctctgtgagtattgaggaaagactagaaaggtttgttggttctgatgtttaagacattttcaaaaaaccatcgaataaactgaatcgaaatcgatttacag

SEQ ID NO: 80 - DNA, 1388 bp, Arabidopsis thaliana
  source 1..1388: mol_type = genomic DNA
agataagagcgaaacaaattacaaaattgaattacacaataatgtcctctaagcgacgactaccggtgaaatattttataagaaaacaaaaacaataattaacaaacaaaggcgacacctttagattcgacaagacgaccattttagaaaaagcttctcaaattctctccttatccccaaaaattcaaacttttttctctttggaaaattctgaggcaaaaatgcggcgtaattgctgccatgtttcatttgcttcaaccctcaagatccttaattttgtccaagctttcattggtgtttcgatcattatctactccatatggatgctccatgaatacagccgtcaccttcccgtggacccgcctccgtcagcttcatcaagctccggaaccgagatcgctactagtgtatctgagcccttgaagaatcctattgattttgtggcgagtatcattctcgggtctaatggtggtgatcatgggtttaacctacgctcgttggaccttcctgctccatggttcatctactctttcatggcggttggtatattggtctgcattgttaccttcattggtttcatagcagctgaagcaatcaatggctgttgcttgtgtttttactctattctcaaaactctgctcattctacttgaagctgcacttgttgcatacatcgctattgaccgtcactgggaaaaggatcttccgtatgatccaactggagaacttagtagtcttagggctttcattgaagaaaacatcgatatatgcaaatgggtggggattgctgtggtagcagtccagctactgtcattgctactagccatggttctcagagcgatggtttcaaccccgaaacccgaacttgacgaagaggaagatgatgagaacccaaggagtagaacttgggacccacttcttggtccgcaaggaaaccaagcgcctgctggctcaagcaagattgaaaactggagctcccgaatcagagaaaagtatggtttgaaccagagtccaccggtgaacccgaaaggttgatgaagccaaataatcatgtttctaaaactgcatgtgtccatatggtctctgtgaagctctctttctctatgttttgctctttgcaacttctcgagtgtgcataaacatttactcaaaacagtgctgtattgtgtttacacaaacggcataagcatcttcgtttgtgtgtttgcttgtacaaacaatcctgtgaacagtttgaagttagcatttccactataacgtttcgattcaatttataatgaagaaaacaaaactaaaaattgaattggacatcataaacagattaatgtaaaatgtatatgtaggttaaactctttcttagattatatcatctatatatgtttcattatt

SEQ ID NO: 81 - DNA, 1145 bp, Arabidopsis thaliana
  source 1..1145: mol_type = genomic DNA
gactccattattatccctctctctacaaaaaaaacagtagagagagatatagagagcatcaatggcgtcgtcgtcaagactttgcgattcgtgcaaatcgacggcagcaactctattctgccgcgcagacgccgcgtttctctgcggcgactgcgacggtaagatccacacagctaacaaactcgcatcacgtcacgaacgagtttggctatgtgaagtatgcgaacaagcaccagcacacgtcacgtgcaaagctgacgccgctgcgttatgcgtcacgtgcgaccgtgatatccactcagctaatccactctctcgccgccacgagcgcgtaccaatcactcctttctacgacgctgtaggtccagcaaaatccgcttcctcctccgtcaatttcgtagatgaagatggcggtgacgtcactgcttcgtggcttttagctaaagaaggaatcgaaatcactaatttgttctccgatcttgattatccgaagattgaggtaacgtcggaggagaatagctccggtaacgacggagttgttcctgtgcagaataagttgtttcttaacgaagattacttcaatttcgatctctctgcttccaaaatttctcaacaaggattcaatttcatcaaccaaactgtttcgacgagaacgatagatgtaccgttggtgcctgaaagtggaggagtgacggcggagatgacgaacacggagacgccagctgtgcagttatcaccggcggagagggaagcaagggttttgaggtatagagagaagaggaagaatcggaaatttgagaagacgattaggtatgcgtcgcgtaaagcttacgctgagatgaggccgagaatcaaaggacgttttgctaagagaacagattcgagagagaatgatggtggagacgtcggagtttatggcggattcggtgttgttccgagtttctgatattttccggtgaaagaaacatggtagtagtatatcggttaatagcagattaaggataattaaaactaaaatgtttcctgatttaatcaggggctaagttattgttagaagattgttgttttttgaattaattctcacaattgtatcctaaattatatagtttacttaatgttgaactaataaattttgatttacaatc

SEQ ID NO: 82 - DNA, 2268 bp, Arabidopsis thaliana
  source 1..2268: mol_type = genomic DNA
atggcggaatcaagctctcctctccctcctctttgtgaaaggatctcacacaaaagctatttcttaagagctgtggatctcactattctaggtcttctcctttctcttctattgtaccgtatcctacatgtgaaccaaaaggacaccgtttggatcgtggctttcctctgtgaaacttgtttcaccttcgtatggttgcttattaccaacataaaatggagtcctgctgattataaaacatatcctgaaagacttgatgaaagggttcatgaacttccaccggtagatatgttcgtgaccacagctgatccagtaagggagccaccgcttatcgttgtaaacacagtgctttcactgttagctgtgaattatccggcgaacaaactagcttgttatgtgtcggacgatggatgttcacctctcacttacttctctctcaaggaagcttctaagtttgccaagatttgggttcctttctgcaagaaatacaacgttagagttagagctccttttatgtacttcagaaactctccggaagcagcagaaggttctgaattcagtaaagactgggaaatgactaagagggagtacgagaagttaagccagaaagtagaagatgccactggaagttcccactggttggatgcagaagatgactttgaagctttcttaaacacaaaatcaaatgatcattcaactatagttaaggtggtatgggaaaacaagggaggtgtgggagacgaaaaagaggtccctcatgttgtttacatttcaagagagaaaagaccaaatcactttcatcattacaaagctggagccatgaactttctggtaagagtgtcagggttgatgacaaatgcaccatacatgttgaacgtagactgcgacatgtatgtcaatgaagcagatgtggtgcgacaagcaatgtgtatatttctgcaaaaatcaatggattcaaaccattgtgcttttgttcaataccctcaagatttctatgattctaatgtcggtgaactcaccgtcttacaattatacttgggacgaggaattgcgggaatccaaggacctcagtatgcgggttcaggatgcttccatactagaagagttatgtacggtctttctctagacgatttaggagacgatggaagtctttcttcaattgctacaaggaagtatttagctgaggagagtctaacgagagaatttgggaattctaaggagatggtgaaatcggtggtcgatgcgttacaaagaaaaccatttccccaaaaaaaccttaaggactctctagaaacggctcaagaaatgggacattgtcactacgagtaccaaaccagctggggaaaaaacatcggttggttatacgattcaacaacggaagatgtgaacacgagtatcggaattcattcgagagggtggactagctcatatatttttccggatccaccggcgtttcttgggtgtatgccacaaggaggaccggaggtaatggttcagcagcgacgatgggccacgggactgctcgaaatccttttcaacaaacaaagtccgttgatcggaatgttttgtcggaaaataagatttcgacaaagcttggcttatttatacgttttcagttggggtctaagatcaatccctgagctcttttactgtctcctgcctgcttattgcctactccacaactctgctttatttcccaagggagtttacttaggtataatcatcacacttgtggggatacattgtctttacactttatgggaattcatgaaccttggtttttccatacaatcgtggtatgtcactcaatcatttgggaggataaaaacaacttgtagttggttatttagcgtccttgatgtcatactcaagcttcttggaatatcgaaaaccgtcttcatagtcactaaaaagactatgcctgagaccaagtcagggtctggatccaaaaaatctcaacgagaagttgattgtccaaaccaagattccggtaaatttgaatttgatggctcgctttatttcttgccgggcacattcattgtgttagtgaatctagccgctctagccggttgtttggtgggtctacaaagtcgcggaggaggtggttcgggtttggcagaagcctgtggctgtattttggtggttattttgttccttccatttctaaagggtatgtttgagaagggaaaatatggtatcccattttctactctttctaaagctgcctttttagcagcgttatttgttgttttatctgtgggaaactag

SEQ ID NO: 83 - DNA, 1381 bp, Arabidopsis thaliana
  source 1..1381: mol_type = genomic DNA
catatttatactactagtatataagttaagggtttaagcctcttctcttccttctttctcttagccatcacatcgataatggcttctcttctaacaaaacccaaacccgttttcctctgttcaccatcgttatctccaagaactttgaacacagcaacaccgtcattgaatttcaccagaatttcattcacccatcaccaaaagcttgctcctttcaagcctcctagtctcgttgttgcattctctgaaaagggtttgaagagagatgtcaccacagctgctgcagcgacggagggagattacagaaggataatgttatctgatgtgttggtgaagaagaaggaaaaagtagtttggtgggagagagaatggaaagctatggactttggagctgttgctgtcgttttgtctatgcatttgcttagtcttttggctccgtttcaattcaattggagagctgtttcggttgcttttgggctttatatcgttacaggtcttctggggattactctgtctttccataggaatctttctcataaagccttcaagctacctaaatggcttgagtacttgtttgcttattgtggagctcaagctcttcagggaaacccaattgattgggtgagtacacataggtaccatcatcagttttgtgattcagacagagaccctcatagcccacttgatgggttttggttcagtcacatgaattggatgtttgataccaatacaatcacccaaaggtgtggagagcctaataatgttggggacttggagaagcagccattctatcgattccttcgaaccacctacattttgcatccgctggctctagcggttgctttatacgcaatgggtggctttccattcatcgtttggggaatgggtgtaagaatagtatgggtatatcatataacttggctagtgaactcagcttgtcatgtatggggaaaacaagcatggaacacaggcgatttgtctaagaacaactggtgggtagcagctctagcattcggggaaggatggcacaacaatcaccatgcttttgagttctcagctcgacacggcttagaatggtggcaacttgatatgacttggtacgtcgttaagttccttcaagccatcggtttagcaactgatgtcaagctcccatcggaagctcagaaacaaagaatggcattcaccagcgactgatcttaaaaaactacatggttatgcctaaagtcaaaactgtcggttcgattgaagctatgaaggttttaaaaaaggattttgttctgcttttttgtgtttacttaaaggtatatatctgtgcaagagattgtatgtgacaaactgattatgaataatatctataattacattcaatacaaaaggaagc

SEQ ID NO: 84 - DNA, 980 bp, Arabidopsis thaliana
  source 1..980: mol_type = genomic DNA
aaatcactcaccacataaagtaaaagtctcatctcttcataaaatagctttaaaccaatcaagtagagtttcttctcaagtctttttattttatttttatcaatggcttcttcagcagtgtctctccaatccatctctatgacaactctcaacaatctttcatgtaatcaacaatttcatcgaagctctcttcttggttcctctaaatccttccaaaatcttggtatctcatctaacggttcagatttctcctatccatcaagtttcactgccaagaagaacctcactgcttctcgagctctctcccaaaacgggaatatcgaaaaccctagaccaagcaaagttcaagaactgagtgtgtacgaaatcaacgaattagatcgacacagccccaagattcttaaaaacgcattcagcttaatgttcggtctcggagatctcgtaccattcacaaacaaactctacacaggcgatctcaagaaacgcgtgggcatcacggcaggtctctgcgtcgtcatcgaacacgtcccagagaagaaaggtgaaagattcgaagctacttatagcttctacttcggagactatggccacttgtccgttcaaggaccatacttgacttacgaggattcgttcctcgccatcactggtggtgctggaatctttgaaggtgcctacggacaggtcaagcttcaacagcttgtgtatccgacaaaactgttctacactttttaccttaaagggttggctaatgatttgccgttggagctcaccggaacaccggtaccgccgtctaaggacatagagccggcgccggaagctaaggcactggagcctagcggagttataagtaactataccaactaattcatgaaattaaaatgtttctcgtatcgctgtgtaatgatataaagatttgtagttttgtgctcttatctgtaataaaatcattgaggaataatatctcgagtatgttttaagtc

SEQ ID NO: 85 - DNA, 2706 bp, Arabidopsis thaliana
  source 1..2706: mol_type = genomic DNA
ccggttacagctacaccgccgttttctctctccgccgtcttttctcttcttctccgactgaatctgtgaaggtgaatttcggagttgagaaagagagattagcgtgtaatggcgatcgataatggcaagcttcaagaagaagaagcctcatctgttactcgattctataacattattttgggttgggactataaacagcttactaaagagaatgagaggaaaaatagaaaggattctaaagagaaattgaatgttgtaaagaatacttataaagatgttgatgattatttcgagacttttgaaccattgctcttcgaggaagttaaagctcaaattttgcagaataaagatggtgaagaagcatcggtgtgtaaaatgagattggtaatggagtgcaacgagggcgaagggtttcactttctgttagtcacatacgaacatgaggaggatgaatatcttgctcaaaatgatcttttattgctatcaaaagaagaggttaaagggaattcatttccttcatcttatgggtttgctgtagtggaacatcgtcaaaataatcttcttcgtcttcggatgtatttagctgaagacattgtgcagataaccaagaatactaaatcctctagaacaaagtcatttatccaagcgctttcaaatatgcgttctcttattacatcatctgccagccctattgacaaaagggtattcagtttaaagttatgtggtttatcaaccattattcgggaatatatagcactacgatcagttagttcgctccctttcaaggatttaatcttcactgcagcagaaaaatcttgtggttttggagatgaagcatggaaaatatctggacctctgaatgaattctttaacgaaaaccttaacaaatcccaaaaggaggcaattgatgttggtctatcaagaaaatccttcgtcttaatacagggtcctccaggtaccgggaaaactcagacgattcttagcatacttggtgctattatgcatgctactcccgcaagagtccagtctaagggtacagatcatgaagtaaagcgtggtattcagatgactatccaggaaaaatacaatcactggggaagagcctctccttggattttgggtgtcaaccctcgagatgctattatgcctgaagatggtgacgatgggttctttccaacctcaggaaatgaattgaaaccggaggtggttaatgcgagtcggaagtacagattacgtgtacttgtctgtgctccatcaaactctgcacttgatgagattgtgttgcggcttctgagttcgggtcttcgtgacgaaaacgcccagacatatacacccaaaatagtacgaattggtctcaaggctcatcactctgttgcgtcagtatcactggatcaccttgtggcacaaaagcgtggctctgccatcgataagccaaaacaagggactacaggaactgatatagatagtatccgcactgcaattttggaagaggctgcgattgtgttcgctacccttagcttcagtggctctgcacttcttgctaaatctaaccgtggtttcgatgtcgttataatagatgaagctgcgcaagctgttgagccagcaactcttatccctttggccactaggtgcaaacaagtatttctggtaggggatccaaagcaactcccagctactgtaatctcaactgttgctcaggattctgggtacggtacaagcatgttcgagagacttcaaaaggctggctatccagtaaaaatgttgaagacccaataccggatgcatccagagataagaagctttccgtcaaagcaattctatgaaggggcactagaagatggatctgacattgaagctcagactactcgtgactggcataaataccggtgctttggtccattttgcttttttgatatacatgaagggaaagagtctcaacatccaggagcaactggttctcgggtaaatctagacgaggtggaatttgttcttctcatctaccacagacttgtaaccatgtacccggagctgaagtctagttctcagctagctattatatcaccgtataactaccaagtaaaaactttcaaagatcggtttaaggagatgtttggtacagaggcagaaaaagtggttgatatcaacactgttgatgggttccagggaagggagaaggatgttgcaatattttcatgcgtcagagctaacgaaaatggacaaatcggttttctctctaattctcggcggatgaatgtggggattacacgagccaagtcttcagtattggtcgttggttcagctgcaacattgaagagcgatccactttggaaaaaccttatcgaaagtgctgagcaaagaaaccgattattcaaggtttcaaagccattgaacaatttcttcagcgaagagaatctggagacgatgaaactgacagaggacatggagattcctgatgcaccgttgtatgaagacgaatctcttccggtggcaccatatggtggagatgatgactttggagatggtgatgctgatcaagacgatgtagccatggccggagaagactaaactctaaaaaccttttcgttattagttagaactttgatattacaggaagtggttgaacatctaacaatatctacacttattatttgtatggttttattttggtttacatacagtaataagaatgtctttacttgtgctacg

SEQ ID NO: 86 - DNA, 1543 bp, Arabidopsis thaliana
  source 1..1543: mol_type = genomic DNA
ctctttctttgtgggttctagtttgtgtgtatatatactatatgcacatacacataggaagatatgatgggttacgagcagatgaatcagatgacaatgacgacaacagcgatgatgaagaattacaataagaagggactaatcaatactccacagaagaaaatgacgaggagaagtgtgtcggctattgatggtggtgcagctgcgacggctaaagaaggagatcgccgtcagaatatcaagactcttgatcttagcggcatgtccttggcttctctctctgcctcttctatcaacttagcttcaatctccaaactcgatctctccaacaacaatattcagaaaattccggaatctctagtagcgagaatgttaaatttgtgggcattggatttgcaatccaatcagctaaaaactcttccaaactccattggatgtctttccaaacttaagtttcttaatgtctccggaaattatctccaatctctccccaaaactatagaagattgcagatcgctggaagagctgaacgccaacttcaacgagcttacaaggctcccagacgcgatagggtttgagctaacgaatctgacgaagctctccgtcaactcaaacaagcttgttctcttgccaaactccgttagctacttgacgtcgctgcgtgtgctcgacgcgcggctaaaccgccttagttccctccctgaggatcttgagaacctcgtgaaccttcaggtcctcaacgttagccagaacttccagcacttgacgacgttaccttactccgttgggttgttgatatctctcgtggagcttgatgttagttataacggaattacggttttaccagactccctcggctgtcttcgccggattcagaagctatccgtggagggtaatcccctcatttccccaccatttgaagtggtggaacaggggttggaagcattgaagcagtatatgagcgagaagatgaccgagtcttataagaaaactccgaccaagaaaaagtcttggggcattggtaagctcgtaaagtacggcctgagctcttctccggggaggagtaccggccgtgaagacgggaaggaaggcttcatcaatgtatctgattaccgccaaatcgacggaatcgcctcaccgcgacatgtgtccctcttcaacccgcgacgcctcttgtctccactctccgcgtatttctctcctcctaggtattagcttatttaggtgtgttgtctgtctttttttttttcatcttctacatacgattccataccgttttcactgttacatccatgtagtgttaaattgttaatgttcttttacgttgttttctgcatgcttggtgtgaggataaaatttaattaaattgtgtatacgtttttttttccctgtctcatagaatttttctatggcttttctcatttcgttgtattgtagttcaattttgttgaacacatttgtaaactattacatagacacttaatattttactatgtatataatgtaaaatcgcatttttgaaagtactccaccatccttctca

SEQ ID NO: 87 - DNA, 1543 bp, Arabidopsis thaliana; identical to SEQ ID NO: 86
  source 1..1543: mol_type = genomic DNA

SEQ ID NO: 88 - DNA, 3675 bp, Arabidopsis thaliana
  source 1..3675: mol_type = genomic DNA
ctttcactcttcccttctctctccccaaaataaatcagaaacctatcaacattcttcaacagccacaagtaaaatttatagacatttctgtctgaagaagaaaaagattgaatttttttgcttgttgtgggttctttaatggatccaagaacaagacttgactatgctctgtttcagctcacaccaactagaacaagatgtgatcttgtgatattctctggtggtgagaatgagaaacttgcttctgggatttttcaacctttcgttacgcatctcaagagcgttagtgatcagatttctaaaggtggatactccgttactctccgtccttcctccgttggtgttccttggtttactaaagtgacccttcagagatttgtgcgatttgtgactactccggaggttcttgagaggtctgtaacattagagaaggagattgagcagatcgaggattcgattcaagctaatgcagccgccattgccggtgaagctgaaggaaacgagttgggtggtacatggacttctcaaaagtctacggctttatcaaagacgaaaggggaaactgatggagacactgtggaagaaaattcgaaggttggtcttcagcgtgttctggagaaccgtaaagcggctttgtgcaaagagcaagcgatggcttatgctcgagctttggttgttgggtttgaacttgactacatggatgacctcttttcgtttgctgatgctttcggagcttcgcggttaagggaagcgtgtgttaactttgtggacttgtgcaagagaaagaacgaggatagaatgtgggtggaccaaatcactgctatgcaagcatttcctaggcctgaattaacgttcatgggtgactctgggatcgtactcgctggtgaagagaatgatttgttgaatgctacaaacgtaaagcatggaaactctatggatgcctcgagccagggtagctttgagactggccaagaagggagagctcaaatggcaatgccgtggccaaaccagtttcctcagtacatgcagaactttcaaggacatgggtatccgcctccttatatgtttccggggatgcaaggtcaatcaccatatttccatgggaatatgcaatggcctgtaaacatgggagatgtggagtcaaatgagaagtcttccaagaagaaaaagaagaagaagaagaataagaagaagtcgaagcaagatgaatctgccgagccaagcgataattccagtactgagaccgaatcagaagacggaaatgaaggaaagaaacaatccaggaaagtggttatccgcaacataaattatataacttcaaagaggaatggagcgaaggagagtgattcagatgagtctggagaagaagaagggtttgtggatggagattctattaagcagcaagtagaagaagccattggctcagtggagagacgtcataaatcgacttcacaccgtcagaggaaacacaaaagtcacaacggtgatgatgattcaagtaacaaggaaactaaggggaatgataattgggatgccttccagaatcttcttttgaaagacaatgattcagagccagaagaattactacgtatatcatcaactgcgttaaatatggcgtctgaagttgtgagaaagagagaaccgccttctgatgattcattcttggttgcaattggaaatgaggattggggaagagaaaccagcattgagaaattcaatgcaggtgagaatgttcggataataaggaaagggaacaactatgacgaggagatgttgaatccgggtagaagcgatgaatcaagaagctattcgcaggcagagatgtcggttcatgatgggaagctcagaaccagaaatgaggcggaagaagactggttcatacgtaaccaagctggtccagaaacagatccaagtcttgtcaaaacatttgtaggagaccatttccacttaaataagagcagtgagagagatgtcctgaccgatgactctttcatgatccattctcgtgttgagaaccaagtagaagattctcggttaaggacagaaatcatggacttagacgtttacggaaccacccaacaagaaaacagtgccccggagaacactccgcatgaaccagatgacctatacatggttcttggacgggaacaagatgttaaacctacattgttaccatggacccctgaaattgactttgagactaacactttggctcaaagaacaagcagaatcgatttgataactgccacaaaggcctctgcaggtgaacaaaccttagatggtaaagaaaagaagagtcgtggtatctccaaggggaaggatgcaaagtcaagagcatcaagtagacctgacccggcgtcaaaagccaagagacctgcttggggaagtagagctgctgtctccaagtccaaatccgagatggaggaagagagaaagaagagaatggaggaacttttaattcagaggcaaaagagaattgcggagaagagttccggtggtagtgtatcaagttctttagcgtccaagaaaactcctactgtgaccaagtcagtgaagagctcgataaagaatgagaagactcctgaagccgcgcagtcaaaggctaagccagtactgagaagttccaccattgagcgccttgctgttgctcggaccgctccaaaggagccacagcaaaaaccagtaatcaaaagaacatcaaaaccttcaggatacaagacagagaaagctcaggaaaagaaatcgagtaaaataggtcaatcagatgcgaaaagtgtggaactttctcgtgacccgagtctcgaaatcaaggaaacggtggtggaagattcacattcttacttgtcagagaagcaagttgatgcacttcctgctgttgcttctgttgatgatttcaaagacattaaagaattgcatagcttgccatcagaagaaacggccagagtaaagaacagaccgaatgaaatcatagcagagaaagtacaagatcagacgaagatcgatgatcaggaaacagtgaagaatacatctgtttctgaagataagcaaatcaccacgaagcattactcagaggatgttggagaagtccaggcttcacaggaaaaaccggtgtctccaaagaagtcggtgactttttcagagacaaacatggaggagaagtattatttctcaccagcggtctcagagattgacatctcaacgccacctgctactgaagcagatcattcgaggaagaaatggaacagtgaagagacgtctcccaaggcaacggctaaagtcttcaggaagcttcttatgttcggaaggaaaaagtaaaaccgacgttggaattcttcttctccggcatcatcgaacctttgttttgagacgacgtcatgttgagttcagagaacaatatatggggatgtgttggaatcatgaatcgtaggttaaatcctacaagaggaaaagcttcaggagacagagaagatgaagagaagagaagaaaggaagaagaagaagaagtcgtgacaaagaaagtcagctaatagacatatctccgctatttaaagtcgagtctaagcctttatacacttaaaggttgagggttcgaacccttgttatgtctttttgccctaaaagaaaaaaactttctcatgaaattccgtgagatgattcttccattctaagcatttg

SEQ ID NO: 89 - DNA, 3675 bp, Arabidopsis thaliana; identical to SEQ ID NO: 88
  source 1..3675: mol_type = genomic DNA

SEQ ID NO: 90 - DNA, 3727 bp, Arabidopsis thaliana
  source 1..3727: mol_type = genomic DNA
atatccagataattaattctctcataatatcttctccacaatttcaactcttctaaagtctaaaccatgaagttactctcaaagacctttttgatattaactctcaccttcttcttctttggcattgcactagcgaaacagagctttgaaccagagatcgaagctttgaaatccttcaagaatggtatttccaacgaccctttaggagtattatcagattggaccatcatcggttcgttacgacactgtaattggaccggaatcacctgcgatagtaccggacatgtagtctcggtttccttgctggagaagcaacttgaaggtgttctgtctccagccatagcgaatctcacctatctccaggttcttgatctcacttcaaatagttttaccggcaaaataccggctgaaataggaaagttaaccgagcttaaccagcttattctgtacctaaactatttctctggttcgattccttctggaatctgggagcttaagaatattttctatcttgatcttagaaataatttgttgtccggtgatgttcctgaggaaatctgcaaaaccagttctttggtattgattgggtttgattacaacaacttaaccgggaaaataccagaatgcttaggagatttggttcatctccaaatgtttgtagcagctggtaaccatttaactggttcgattccggtatcaattggtactctggctaatttaacggatttagacctgagtggtaaccagttaaccggaaaaataccgagagattttggaaatctcttgaacttacagtctctcgttttaactgaaaacttgttggaaggagatataccagctgagatcggaaactgctcgagcttggtccaacttgagctttacgataaccagttaaccgggaaaataccagctgaattagggaatttggttcagctgcaagcactccggatatacaagaacaaacttacttcttcaattccatcttcattgttccggttaactcagttaacccatttggggttatcagaaaaccatttggttggaccgatatcagaagaaatcggttttcttgagtcacttgaagtcctcacacttcattccaacaacttcacaggagagtttccacagtccatcacaaacttgaggaacttgacagtcctaacggtggggttcaataatatttccggtgagctcccggcggatctagggcttcttacaaaccttcggaacctttcagcgcacgacaatcttcttaccggaccaataccttccagcataagtaactgcaccggtcttaaactcctggacctgtctcacaaccaaatgactggcgagatcccgcggggtttcggaaggatgaatcttacgttcatttctattgggaggaatcatttcaccggtgaaattccagatgatatcttcaactgttcaaacttggaaactcttagtgtggcagataacaacttaacaggaactctcaagccattaattgggaagcttcaaaaactcaggattttgcaagtttcatataactctctcactggaccgattcctcgagaaatcgggaatctgaaagatttgaatatcttgtaccttcactctaatggtttcacagggagaatcccgagagagatgtcgaatctcactctcctccaggggctaaggatgtattcaaatgatcttgaaggtccaattcctgaagaaatgtttgatatgaagctactctcagttcttgatctttccaacaacaaattctcaggtcaaattcctgccttgttctccaagcttgaatcgcttacctacttgagtcttcaaggaaacaaattcaacgggtctatccctgcaagccttaagtcgctttcgcttctcaacacattcgatatctccgacaatcttctcactggaaccatccctggagagctgttagcttctttgaaaaacatgcagctttacctcaacttctcaaacaacttgttgactggaaccatcccaaaggagcttggaaagcttgaaatggttcaagaaatcgacctttcaaacaatctcttttctgggtctattccaagatctttacaggcctgcaaaaatgtgttcacactggatttttcgcagaacaatctctcgggtcatataccagatgaagtcttccaaggcatggatatgatcataagcttgaacctttcaaggaacagtttctctggagaaatccctcagagcttcgggaacatgacgcatttggtctccttggatctctctagtaacaatctcactggtgaaattccagagagtctcgccaatctttcgactctgaaacatctcaaactagcttcaaacaacctcaaaggccatgttcctgaatccggggtgttcaaaaacatcaacgcctctgatctaatgggaaacacagatctctgtggtagcaagaagcctctcaagccatgtacgatcaagcagaagtcgagccacttctcgaagagaaccagagtcatcctgattattcttggatcagccgcggctcttcttcttgtcctgcttcttgttctgattctaacctgttgcaagaaaaaagaaaaaaagattgaaaattcatcagagtcctcattaccggatttggattcagctctgaaactgaagagatttgaaccaaaagagttggagcaagcaacagattcattcaacagtgccaacatcattggctcaagcagcttaagcacagtgtacaaaggtcagctagaagatgggacagtgattgcagtaaaagtattgaatctaaaggaattctctgcagaatcagacaagtggttctacacagaagctaaaacattgagccaactaaaacatcgaaacctggtgaagatcttagggtttgcgtgggaaagcggcaaaacgaaagctttagtgcttccatttatggagaatggaaacttggaggacaccattcacggctctgcagcaccgattgggtcgcttttagaaaaaatcgatctttgtgttcatatcgcaagcggaatcgattatcttcattctggatatggttttcccatcgttcattgtgatctgaagccagctaatatactccttgacagtgaccgcgttgctcacgtaagcgattttggaactgctcggattctaggtttccgcgaagatggaagcaccacagcttcaacatcagccttcgagggtacaattggatacttagctccagagtttgcttatatgaggaaagtgacaacaaaagccgatgtattcagcttcgggatcataatgatggagctgatgacgaaacagagaccaacttcgttgaatgatgaagattcacaagacatgactttgcgccaattggtggagaaatcgattggaaatggaagaaaagggatggttagggttcttgatatggaactcggggactctattgtttctctgaaacaggaagaggctattgaagactttctgaagctttgtttgttctgtacaagctctagacctgaagatcgacctgatatgaacgagattcttacacatctgatgaaacttagaggcaaagcgaattcatttcgagaagatcgtaacgaggatcgagaagtttagcagcaaagcttttttgatgacattttttcgactttgccaaactctgttacgaaggttgaatactttggacgtaaaacgttctgattttgcttttcgttatgtatttctgttttatataaggttgaaatttggttttgat

SEQ ID NO: 91 - DNA, 1177 bp, Arabidopsis thaliana
  source 1..1177: mol_type = genomic DNA
caaaacaaaacgccattttttgtcgattcttcgtcgtcctcctttgaaattcacaccaatttgtctctcttcctagagaaacaaaagattattcgaaactcgggaaagtatcatccggtcaccggaaaattgattatttccgatgccaataggtgaccgtcagaatccgagtgtggagaagaagaagaacctcttcaggctatgtccgttttggcagaggagaagcaccacttcttcatcttcaacacagaatccaaaccaaaactaccgtagccgccatggaaatcggaatacagatatttccgccgtctctaagcctccgttgactatgtcttccgtcgccagatcacttcttccagctcgccgtcgtctccgactagatccttctagttatctgtatttcccttatgaacctggaaaacaagttcgcagcgcaataaagcttaagaacactagcaaatctcatactgcatttaagttccaaacaacggcacctaagagttgttatatgcgtcctcccggaggtgttttggctccaggagagagtgtttttgctactgtgttcaagtttgtggaacatccagagaacaatgaaaagcagccgttgaatcagaagagcaaggttaagtttaagattatgagcctgaaagttaaaccaggagtagagtatgtgcctgagttgtttgatgagcaaaaggatcaagtagcagtggagcaggttcttcgggtcatttttattgatgcggaccgcccaagtgctgcattggagaaactgaaacgtcaattggatgaagctgaagctgcagttgaagcaagaaagaagcctcccccagagacagggcctcgagttgtcggggagggtcttgtcatagacgaatggaaggagagaagagagaagtaccttgctcggcaacaagtcgaatccgtagattctttgtcctaaacgcagagagcaatgtggacttgttctgcagatcatgtacataatttattatccctcgattatgtatttatctctagacgattactttgtggttcttgtatgtctctgtttgttgtgtgattcatgccggttttttctccttcatcaaattttgtttcggtcgtttttagttgatctagaatcgaaccagagtttgttcagtatttagttacaaatgaaaaatcctgttatacc

SEQ ID NO: 92 - DNA, 1115 bp, Arabidopsis thaliana
  source 1..1115: mol_type = genomic DNA
tactcacttttacaactaactcataagtaaaacacagacagtttttagatggctaagatatattccccttcttttcccggtactctctgtctttgcatttttactctcttgacgctaatgttcattcgggtttccgctcgacccgcgacattcgtcgaggatttcaaagccgcctggtcggaatctcacatccgtcaaatggaagacggaaaagctatccagctcgtccttgatcagagcactggatgtggatttgcttccaaaagaaaatatctattcggacgagtgagcatgaagatcaaactcattcccggagactctgccggtacggtcaccgctttctacatgaactccgatacggccacggtgagagacgagctagattttgagttcttgggaaacagaagtggtcaaccttactcagtgcaaacaaacatatttgctcatggcaaaggagatagagaacaaagagttaatctttggttcgacccatctatggattaccacacttacactatcttatggtcacacaaacacattgttttttacgtagacgatgtgccaataagagaatacaaaaacaacgaagccaagaacatagcttacccaacatcacaacctatgggagtatactcaacattatgggaagcagatgactgggcaacacgtggtggattagagaaaattgattggagcaaagctccattttatgcttattacaaagatttcgacatcgaaggttgtcctgttcctggaccaaccttttgtccatcgaaccctcataattggtgggaaggttatgcctatcagtctcttaacgccgttgaagctcgacgttaccggtgggttagagtaaaccatatggtttatgattattgtactgaccggtctaggtttcctgtcccaccacccgagtgtcgtgcttgaaaataattgcatacgtacgttgcaatgatcatgtttcgtcttgtacgagattttatatataaattgtgggaaaatgtggattgtattgtcctcttacgcaattgtgcagacgtacgtgagtgtgtatagatataattgtgatttgtggttatttgaaatttttataaacatagatgaattctgtgaag

SEQ ID NO: 93 - DNA, 1981 bp, Arabidopsis thaliana
  source 1..1981: mol_type = genomic DNA
actggtgtgcgcactaagcaagcatactctattatttgtcgaaatcacaagagccagccagtctctctgagttctatcacaatcttcttcttcagagcttattgagtaatggcggcttcaatgcagttctacggagttaaaacaccagaacttgccttaaactcaaaaaggattgagtttagctcaaaggggctcaacttctcagcactcgtgtcctctgctcgtgtattctctagaaacgtagatcgttcttgtaagaacatcgctctgagagttacttgtgaagcgggaagagtggagctgctagagagaaaagcctcagagactttcaagttaaacaaaactgagaaaaaattgacctgtgtaatgaaattcggtggctcatcagtggcatcagcagaaaggatgatacaagttgccaaactcatactcagcttcccagatgagaagcctgttgttgtgctatcagcaatggcaaagaccaccaataagcttttgatggctggggagaaggctgtttgctgcggtgtcaccaacgtcgacactatcgaagagttgagctatataaaggaactccatataaggactgctcatgagcttggagtggaaacagcagttattgcagaacatctagaaggactggaacagcttcttaaaggcgtcgcaatgatgaaggaattaactttacgctcaagagactacttggtttcatttggagaatgcatgtccactaggctatttgctgcgtacctgaacaaaattgggcacaaagcacgacagtatgatgcatttgagatcgggattatcaccacagatgacttcactaatgctgatattcttgaggcaacatacccggcggtttcgaaaaagttacttggtgactggagcaaggaaaatgcactccccgttgtcacaggcttccttggaaagggatggagatcttgtgctgtaactacgcttggtagaggaggtagcgatttgactgcaacaacgatcgggaaggctttaggtttgcgggagatccaggtttggaaagatgtggatggagttttgacttgtgatcctaacatttactgcggagctcaacctgttccacacttgacatttgatgaggctgctgaacttgcttactttggtgcccaggtgttgcatccactttccatgcgcccagcgcgagaaggtaacattcctgtaagggttaagaactcttacaatcccactgctccaggaactgtcatcaccagatcaagagacatgagcaaggctgtattgaccagcatcgttctgaaacgtaatgtcaccatgttggacatcactagcacccgtatgctcggccaatatggtttccttgccaaggtgttttccacatttgaaaagttgggcatatctgtggatgttgttgcaaccagcgaagttagcatttctttgacattggatccttcaaagttctgtagcagagagttaattcaacacgagcttgatcaggtggtggaggaacttgagaagattgctgttgtaaatctgcttcgacacagatcaattatctctctcatcggaaatgttcagagatcatcattcatattagagaagggcttccgagtacttcgaaccaatgggattaatgtccagatgatctcccaaggtgcatctaaggtaaacatctcactgatagtgaatgatgatgaggcggagcattgtgtgaaggctctccactcggccttctttgagacagacacttgtgaagcagtctcagaatgcccgaccggctacatcgctgcctcttcgtgaaacctctaggtgcaacctgcaaggtctgaaagtactagctagtttgatgttatgattcttgtcagactggtattaggaaacaaagctcccattctccttgtgtaatataatgtaatttgattgggagatgtactggaaaatcaataagttttcctatttgaatatatgattaggactgcctacaacatcagtt

SEQ ID NO: 94 - DNA, 3043 bp, Arabidopsis thaliana
  source 1..3043: mol_type = genomic DNA
atgagatctcttctctttgtactatcactcatttgcttttgctctcaaacagcactttcatggaagaaggaagagtttcgcagctgtgaccaaactccattttgtaaacgcgctcgatctcgtactcccggcgcgtgttctctaattgtcggcgatgtttccatcactgatggagatctcgtagcgaagcttctaccgaaagcgcctaatcaaggcgatggggatcagatcaagccgttgattctttctctctcagtttacaaggatgggatcgtgcggcttaaaatcgatgaggaccattcgttgaacccgccgaagaagaggttccaagttcctgatgtggtagtgtctgagtttgaggagaagaagatctggctgcagaaagtagcgacggagacgatctctggagacactagtccgtcttcagtagtttatgtatccgatggttacgaggcggtggtgcgacacgatccgtttgaggtgtatgtgcgtgagaaatcaggtgatcgccgtcgcgttgtgtcattgaattctcatggattatttgattttgagcagttggggaggaaaactgaaggagataactgggaagagaaatttaggactcatacagattctagaccatctggtcctcaatctattagtttcgatgtttcgttttatgattccagtttcgtttatggaattcctgaacacgccactagcttcgcgttgaagcctaccaagggtcctggagttgaggaatctgaaccctacaggctttttaatctagatgtgtttgaatacgatcatgaatcaccgtttgggctttacgggtcgattccgttcatggtttcgcatgggaagtctggtaaaacttcaggatttttctggttgaatgctgcggaaatgcagattgatgtgttggctaatggttgggatgcagagagtggtatttctttgccttctagtcacagtaggatcgacacattctggatgagcgaggcagggattgtggatacattctttttcgttgggcctgagccaaaggatgttgtaaagcagtatgcaagtgtgacaggtacttcagccatgcctcagttgtttgccactggttatcatcaatgtaggtggaactacaaagatgaggaggatgtggcacaggtggactcgaaattcgatgaacacgatattccttatgatgttctctggcttgacattgagcatacagatgggaagagatactttacatgggatagtgtgttgtttcctcatccagaggagatgcaaaagaaattggctgcaaagggtaggaagatggtgaccattgtggatcctcatatcaagagggatgactcatacttcttacacaaagaggctactcagatgggatactatgttaaggattcatctggaaaagactttgatggttggtgctggcctggttcatcatcttacattgatatgttgagcccagagattagaaaatggtggggtgggaggttctcgtataagaactatgttggttcaactccatcattgtacacctggaatgacatgaatgagccttctgtattcaatggtcccgaggttactatgccaagagatgcattacatgttgggggtgttgaacacagagaagttcataacgcatatggatattacttccacatggcgacttccgatggacttgttatgcgtgaagaaggaaaggataggccttttgtattgtcaagagcaatctttcccggcactcaaagatacggagcaatttggactggagataacacagccgaatgggaacaccttagagtctccattccaatgatattgacacttggtcttactggaattacattctctggagctgatattggtgggttttttggaaatcctgaaccagaacttctagttaggtggtaccaagtgggtgcttactatccatttttcaggggtcatgctcatcacgataccaaaagacgagagccttggttgtttggtgaacggaacacagaactcatgagagatgccatacacactcgttacacactgctcccatacttctacacgttgttcagagaagcaaacgttacgggtgttcctgttgtacgcccattatggatggaattcccgcaagatgaagctacttttagcaacgatgaagccttcatggtcggtagtggtctactggttcaaggagtttacaccaagggaacaacgcaagcttccgtgtatttgcctggcaaagaatcatggtatgacttgagaaacggtaagacttacgttggaggcaagactcacaagatggatgctccagaggagagtattcctgcgtttcaaaaggcaggaaccatcatcccaaggaaggaccggtttaggcgaagttcctctcaaatggacaatgatccttatactttggtggtagctttgaacagttctcaagaagcagaaggtgaactctacatcgatgacggcaaaagctttgaattcagacgaggctcttacatccatcgtcgcttcgtcttctcaaagggtgttcttacatcaacgaacttagctcctccagaagctcgtctctcttcccaatgcttgatcgacagaattatcctcttgggacacagctcaggtccaaaatctgcgttggtggaaccgttgaatcaaaaggcagagattgagatgggacctctgcgaatgggtgggcttgtagcttcctcgggtacaaaggtgttgactatccgcaaaccgggtgttcgagtggaccaagactggaccgtaaagattctgtgattgaacggtttgaaccagtttcactcatggccgttagagtggccgaaatctgcttttccggcgacggaatatcacactttttaatatatgtttggagatttagacttaaatagttgtaagagctaacagtttgaaagtcactttgcattgttgtttatcttcatataaatgagtttagattttgataatttcagaattcgtggaatcataattaacaattttgatagggaaaaataatttgttttttttagtcagagggtcaaataatcttaccttc

SEQ ID NO: 95 - DNA, 787 bp, Arabidopsis thaliana
  source 1..787: mol_type = genomic DNA
attttttctagggtttcctcttccgcattcgtcgtcttcagctcctcctacacagtttcttctctgaatctacttaggaagctaaaatgggtagatgtccgactagaaaagtgaagaagaggagattatctcacaaaacagctcgccgtgacaaattcgaagtcaaaggcgatgacttggtttacacagagttgcgtaaaccggagacggagattaagccgttacagcttgacgaggatttgcctggaatgggtcaattctactgcttacactgcgatcgatacttctccaacgtatcagtgagggatgatcatttcaagactaagaaacacaagaagcgtgtgaatatgatgatgggacaagcgccacactcgcaactcgatgcagatttagccgggggaatggggatgccggacaatggcccaaagctgatgtctaatttggtattcacagagttgcgtaaaccagagacggaggatttacctggaatgggtcaattcaactgcttactctgccatcggaacttctccaatgcatcagtgatggattatcatttcaagactaagaaacacaaaaagcgtgtgaagaagatagagcgaccagcgccacactcgcaactcgatgcagatttagctggtggaatgggaatgccagacaatggtccaaagctgatgtctgcctgagtttttacagttattttccttatttagttaatggaacccgaaattttgttgtaaaactataatctcctaaattaatgatacaggttttttgtctgttgccaagt

SEQ ID NO: 96 - DNA, 1397 bp, Arabidopsis thaliana
  source 1..1397: mol_type = genomic DNA
aaaataatggcttcgcccgggttcgaaccggagaccttcagtgtgttagactgacgtgataaccaactacaccacgaaacctacatgcttctttctaacctcaacaatatatatatacatatagataactgtttaatattgtaacttgtaaccagtgtcggctaatttcgacttttgtagatctttttctgctctttctctctctctctctctctctctctctctctctctctctcttgtattatttctatctcccccgccgtcgaaagagaaacgtcgatcggagaacctttgaaatgtcgactggattagatatgtctctcgacgacatgatcgccaagaaccgtaagtctcgtggtggagccggccccgctcgtggaaccggatccggatccggaccgggtccgactcgccgcaacaaccctaatcggaaatcaacccgatctgctccataccaatcagccaaggcgccggagtccacctggggtcacgacatgttctccgatagatctgaagatcaccgatcgggacgttcctccgccggaatcgaaactggaaccaagctctacatttccaatttggattacggtgtcatgaacgaagacatcaaggaactgtttgctgaagttggagaacttaaacgctacacagttcattttgatagaagtggaagatcaaagggaactgctgaagtagtgtattctcggcgtggcgatgcactcgcagctgtgaagaagtataatgatgttcagctggatggaaaacccatgaagatagagattgtgggcactaatcttcaaactgctgcagccccgtctggtagacctgcgaatggaaactccaatggtgctccatggagcagaggaggacaagggagaggaggtcaacaacgaggtggtggacgaggaggcggtggccgaggtggtggtggtcgtggtaggcgtcctggtaagggccctgcagagaagatttctgcggaagatcttgatgcggatcttgataagtaccattctggagatatggagacaaactaaggaacgtgactgatcttctcaaaccggtaggggttttaggaggaagagaatcgagaaaatgtttgccagaggctttaccacttagcgcctttttggctgtgttgttcatttgtttcattagaatgactttacagaattgagaatatgtgttatttaaagttgttgtctatcttaataccctcaagtgaaaggcagaggaaggaataccaatttcgtttacagatcatatgcaggcaaaagagttttcagaaatcaggtttagttacttgtattgtgtctcttatccaagccatgccttgtggtattatgagcgcagaattttgattgaatattgttcatttgcattaaagtatcaaaccattt

SEQ ID NO: 97 - DNA, 636 bp, Arabidopsis thaliana
  source 1..636: mol_type = genomic DNA
aaaactcctccgtaaaaccctttcatttgcatttgggaatcgattgctcttcttcgtagtcgcctttgaattcgcagagtgagaagcaatgaaggtgagatcatctgtgaagaagatgtgtgagttttgtaaaacagtgaaacgtcgtggacgtgtgtatgttatatgctcttccaatcctaagcacaagcaaagacaagggttcagttcctttgcttatgaaggaattacaccttcccctttgtttgctgagccgattgctagtcaggagttggtgaggctgcctggtcagggggtatcagccggactggcatcacttttacacaaaaggcctatgccaacagcgtatttcggatggaggtctggtcttgcatccattctcttcaaacaaggaaattaggatgtcagcatttccctttttattcttcagatttgtaatcgcagttttcttccaattcctatgaaacattattgtatatctctccacttttactttggtcagtcgtatgctccttcgagacctgtttgattgtgcctcgcatgacctgaacaaagagatatattatgacactcgagtatttgtttttacattttccactggagcatatgttagggatcaatatgtttttcttttag

SEQ ID NO: 98 - DNA, 666 bp, Arabidopsis thaliana
  source 1..666: mol_type = genomic DNA
tgctcttcttcgtagtcgcctttgaattcgcagttagagatggatgcttcagattcgttttacttttgcttccatcatcggatcaactaaggattgcagtttttctgagtgagaagcaatgaaggtgagatcatctgtgaagaagatgtgtgagttttgtaaaacagtgaaacgtcgtggacgtgtgtatgttatatgctcttccaatcctaagcacaagcaaagacaagggttcagttcctttgcttatgaaggaattacaccttcccctttgtttgctgagccgattgctagtcaggagttggtgaggctgcctggtcagggggtatcagccggactggcatcacttttacacaaaaggcctatgccaacagcgtatttcggatggaggtctggtcttgcatccattctcttcaaacaaggaaattaggatgtcagcatttccctttttattcttcagatttgtaatcgcagttttcttccaattcctatgaaacattattgtatatctctccacttttactttggtcagtcgtatgctccttcgagacctgtttgattgtgcctcgcatgacctgaacaaagagatatattatgacactcgagtatttgtttttacattttccactggagcatatgttagggatcaatatgtttttcttttag

SEQ ID NO: 99 - DNA, 1991 bp, Arabidopsis thaliana
  source 1..1991: mol_type = genomic DNA
attccttgcttcatttttcgtcaccctagccgctttactctcttgcgatatctctgaggtaattctggagcagcataaacaatcaattgattcattcttcttgataccaagttgtggaaactctaggattgtttgctgtatatctccagaattgctgttttgattgaatttaggtcgcttagctcagttgatagagcaccacattttttgtggtagaaatcgatttgtttgacagtctctaaccatgggtaaagagaagtttcacatcaacattgtggtcattggccacgtcgattctggaaagtcgaccaccactggacacttgatctacaagttgggtggtattgacaagcgtgtcattgagaggttcgagaaggaggctgctgagatgaacaagaggtccttcaagtacgcatgggttttggacaaacttaaggctgagcgtgagcgtggtatcaccattgacattgctctctggaagttcgagaccaccaagtactactgcactgtcattgatgctcctggccatcgtgatttcatcaagaacatgatcactggtacctcccaggctgattgtgctgtccttatcattgactccaccactggtggttttgaggctggtatctccaaggatggtcagacccgtgagcacgctctacttgctttcacccttggtgtcaagcagatgatctgctgttgtaacaagatggatgccactacccccaagtactccaaggccaggtacgatgaaatcatcaaggaggtgtcttcctacttgaagaaggttggttacaaccccgacaaaatcccatttgtgcccatctctggatttgagggtgacaacatgattgagaggtccaccaaccttgactggtacaagggaccaactctccttgaggctcttgaccagatcaacgagcccaagaggccgtcagacaagccccttcgtctcccacttcaggatgtctacaagattggtggtattggaacggtgccagtgggacgtgttgagactggtatgatcaagcctggtatggttgtgacctttgctcccacaggattgaccactgaggtcaagtctgttgagatgcaccacgagtctcttcttgaggcacttccaggtgacaacgttgggttcaatgttaagaatgttgctgtcaaggatcttaagagagggtacgtcgcatccaactccaaggatgaccctgccaagggtgctgctaacttcacctcccaggtcatcatcatgaaccaccctggtcagattggtaacggttacgccccagtcctggattgccacacctctcacattgcagtcaagttctctgagatcttgaccaagattgacaggcgttctggtaaggagattgagaaggagcctaaattcttgaagaatggtgatgctggtatggtgaagatgactccaaccaagcccatggttgtggagaccttctctgagtacccaccacttggacgtttcgctgtgagggacatgaggcagactgttgcagtcggtgttatcaagagtgttgacaagaaggacccaactggagccaaggttaccaaggctgcagtcaagaagggtgccaagtgaactctgaacatcaaaactctttccgctgatgaaatgaaggactattttagtttctttactttagtagtttggtatttggttggttgtttgtgttaccgcttcgtttattctccgtcggagctcaattctcggaattgggttcttgatcggaggtggcggaggtacttggcactcgagcttcctgtttatttcttttgttttgtgttatgattttgaacctttttggatattcggttatatgatatttgtgtcattcctgcggatattatcttatcttatcaacttaagtctgtttttcttctctaaaattcaacgatcagcctctgaagtttcttacatggtaaaattgtaatctagaactttaaacaacattggagaaacaagtctatatcagttt

SEQ ID NO: 100 - DNA, 1408 bp, Arabidopsis thaliana
  source 1..1408: mol_type = genomic DNA
tcatgatccttaatcttagctcctagggtttctgtgaattagtctaattttacaattttatgcctttgaggatatatcttaatgtgaaagttttaaacttgtaactcaaaaaccatttgttagttagtaatcatcatcattctgaattgagctttgtttgaatttgagtagggcaacgaaagattcaagttagttgcggtggtaagagtgaggtgttgaagagtgatacaatggaacctcatgaagcagaaacgtttgtgaacaagagaaccctttatgctcccattgagccatatagcagtggaaatttaaaggtttcagatgttcacactctctactgggagcaatcaggcaaacccgatggacacccggttgtttttcttcacggcgggccgggaggagggacggctcctagtaataggagattcttcgatccggagttttatcggattgttctgtttgatcagagaggtgcggggaagagtacaccgcatgcttgtttggaggaaaacaccacatgggaccttgtgaatgatattgaaaaactaagagaacatttgaaaatacctgaatggctggtttttggaggatcatggggaagcactctagctcttgcatacagtcagtctcaccctgacaaggttactggtttggtccttagagggatctttttgttgcgtaaaaaggagattgactggttttacgagggcggtgctgctgctatttaccctgatgcttgggaggagttcagagatcttattccagaaaacgagagaggtagtagccttgtggacgcgtatcacaaaagattgaattctgatgatctggaaattcaatacgcagctgcaagagcttggactaaatgggaaatgatgactgcttatcttcgtccaaatcttgaaaacgttcaaaaggcagaggatgataaattttcattggcgtttgcaaggattgaaaatcactactttgttaacaaaggtttcttcccgtcggactcacacttgctagacaatgttgataaaatacgacatatcaagaccaccattgttcagggaaggtatgacgtatgctgtcctatgatgtctgcttgggatctgcacaaagcatggccagaggcagaactcaagattgtttatgatgctgggcactcggcaaatgagccaggaatatcagcggaactcgtggttgccaatgaaaagatgaaagcacttatgggatgaagtatttgatggaatgaaagctgctcattttgttcatttctttgggacctttgttcatattttcaagtttgttgctgcaaagtaaatatcacattcagagttagttgttaacgcgaaaccgaatgttatttccatggacgtttatacccaaatgaaaaagacaatgacataggtgcagtgttttgaaa

SEQ ID NO: 101 - DNA, 1213 bp, Arabidopsis thaliana
  source 1..1213: mol_type = genomic DNA
acagagttcagaatatcgacggcgacaatttctctctccggctaacttttttctagagaaagctatggcggacgaagaagatgagttactggagacagaactaagttacgaccagaaaaaggaaatcgccaagtggtttttcctcaacgctcccgctggagaaatcaattacgtcgctaaagatttaaaggcggttttgagcgatgaggaagtgtacaatgaagcagccatggaagcatttccagtgtacaacaaaactcacatgatttgccttgaaatgcccagtggagctggtgatgtgattgtctcatcttacagtgaaattaatgaaaatgagtaccttgatccaagaactgcccaggttgccatagttgatcatgttaaacagatttgtacaaaggtacggcctgcaaatgatgaagaacttccttctttgtatattgaggagtacagatatgctcttgatgctgaaatccagagatatgttagtgaatcttatccgaaaggtatgtctgcagttaattgtgtgaaagggaaagataatgagggtccagggtccgactttgagcttgttgttataattactgctatgagacttagtccccagaacttctgtaatggaagttggagatctgtatggaacatagatttccaggatgaatcccaggtgcttgacataaaagggaaattgcaggtaggagctcattattttgaagagggaaatgtggaattagatgcaaaaaaagatttccaagattcaacaatatttcagtctgcagatgactgcgcgattgccatagccaatattatcaggcaccatgaaacagagtaccttgcatctctagaggtagcttattcaaaattaccggataacactttcaaggatttgaggaggaaacttccggtgacacgaactctgttcccatggcagaacactttacagttcagcctaacaagagaggtcgagaaagaacttggacttggcaagataagtattatttctgttgtgtcttgtctttcctttggagtaatgtatacaaatcgcattagtaagtatgatagatattgttccgcaagccgcatgaaagaattgaagtttggtcccaaaaagagctccgttgccgggaatcgaacccgggtctcctgggtgaaagccagatatcctaaccgctggacgacaacggatatgttattggaactgttaaagaactaa

SEQ ID NO: 102 - DNA, 2160 bp, Arabidopsis thaliana
  source 1..2160: mol_type = genomic DNA
ctcgtctccttctccacttggatctcaaaagtccgatccaaaaccaaatccgccataactctctctctctctcccacttcccacagagagacacattcatgccagcaatgccaggtctcgtctcagtcaaaactccttccgatacaccgccgctacgtgtagccgtaccagacacgcaacctctctcaaacccgccgcgaactccgatgaagaaaaccccttcctctacaccatctcgatccaaaccatcaccaaatagatccaccggcaaaaaagattccccaaccgtatcctcctccaccgcagccgtaatcgacgtcgacgatccatctctagataatccagatctcggtcctttccttctaaaattagctcgtgacgctattgcttctggtgaaggtcctaacaaagcattagattacgcgatccgagcaactaagtcctttgagagatgttgcgccgccgttgctccgcctattcccggtggtagcgatggtggacctgttcttgatctcgctatgagccttcatgttctcgctgctatttactgtagtctcggccgatttgatgaagctgtaccacctcttgaacgagctattcaagtccctgatccgactcgtggccctgaccactctctcgctgcgttttctggtcatatgcaacttggtgatacgttgtctatgcttggtcagattgatagatctattgcttgttatgaagaaggtcttaagatccagatccagactttgggtgatactgatccacgagttggtgaaacttgcaggtacttagcagaagcatatgttcaagcaatgcagttcaataaagcggaagagttatgcaagaagactctagagattcaccgagcgcatagtgaacctgcttcactggaggaagcagctgataggagattgatggcaattatctgcgaggctaaaggagattatgaaaacgctcttgagcatcttgttcttgctagtatggctatgattgcgagtggacaagaatctgaggttgcatcgattgatgttagtattgggaatatttacatgtcgctgtgccggtttgatgaagctgtgttttcatatcagaaggctcttactgtgtttaaggcttctaaaggagagactcatccgacggttgcgtcagtgtttgttagattggctgagctttaccatagaacagggaaacttcgtgagtctaagtcttactgtgagaatgcgttgaggatatacaataagccggtgcctgggacaactgtggaggagattgctggtggattaactgagatttctgctatttatgagtctgtagatgaacctgaggaagcattgaagctacttcagaagtctatgaaattgcttgaggataagccaggacagcagagcgccattgcagggttagaggcacggatgggagttatgtattacacagtggggaggtacgaggacgcaagaaacgcgtttgagagcgctgtgacaaagctacgggcagcaggtgagaaatctgccttcttcggtgttgtattaaaccagatgggactagcctgcgttcagcttttcaagattgatgaagcgggtgagctgtttgaagaagcaagaggtattcttgaacaagaacgtggaccgtgcgatcaggacactctcggtgtttatagcaatctagctgctacctatgacgctatgggaaggatagaggatgcgattgagatattagagcaggttctgaagctgagagaggaaaagctcgggactgcgaatccggattttgaagacgagaagaaacgtttggccgagcttttgaaggaagctgggcggtcgcggaactacaaagccaagtcgctccagaatctgattgatccaaatgcaagacctccgaagaaagagtcttctgctaagaaatggcccagcctcggtttcaagttctgaggaaaaaattatcatataaaataaatcatccacatatatattcaatattttattttattgttattgttatattttttatctgatctattttctgtatcataatctgaggttgatgaattaatttcatgtatagtgtttttatttgagtttggtgaaatactgccaagatggtgagctgtttgtttgagtttgaaatttctttaattcaatcacttttttcttcttctgataa

SEQ ID NO: 103 - DNA, 2248 bp, Arabidopsis thaliana
  source 1..2248: mol_type = genomic DNA
ctcgtctccttctccacttggatctcaaaagtccgatccaaaaccaaatccgccataactctctctctctctcccacttcccacagagagacacattcatgccagcaatgccaggtctcgtctcagtcaaaactccttccgatacaccgccgctacgtgtagccgtaccagacacgcaacctctctcaaacccgccgcgaactccgatgaagaaaaccccttcctctacaccatctcgatccaaaccatcaccaaatagatccaccggcaaaaaagattccccaaccgtatcctcctccaccgcagccgtaatcgacgtcgacgatccatctctagataatccagatctcggtcctttccttctaaaattagctcgtgacgctattgcttctggtgaaggtcctaacaaagcattagattacgcgatccgagcaactaagtcctttgagagatgttgcgccgccgttgctccgcctattcccggtggtagcgatggtggacctgttcttgatctcgctatgagccttcatgttctcgctgctatttactgtagtctcggccgatttgatgaagctgtaccacctcttgaacgagctattcaagtccctgatccgactcgtggccctgaccactctctcgctgcgttttctggtcatatgcaacttggtgatacgttgtctatgcttggtcagattgatagatctattgcttgttatgaagaaggtcttaagatccagatccagactttgggtgatactgatccacgagttggtgaaacttgcaggtacttagcagaagcatatgttcaagcaatgcagttcaataaagcggaagagttatgcaagaagactctagagattcaccgagcgcatagtgaacctgcttcactggaggaagcagctgataggagattgatggcaattatctgcgaggctaaaggagattatgaaaacgctcttgagcatcttgttcttgctagtatggctatgattgcgagtggacaagaatctgaggttgcatcgattgatgttagtattgggaatatttacatgtcgctgtgccggtttgatgaagctgtgttttcatatcagaaggctcttactgtgtttaaggcttctaaaggagagactcatccgacggttgcgtcagtgtttgttagattggctgagctttaccatagaacagggaaacttcgtgagtctaagtcttactgtgagaatgcgttgaggatatacaataagccggtgcctgggacaactgtggaggagattgctggtggattaactgagatttctgctatttatgagtctgtagatgaacctgaggaagcattgaagctacttcagaagtctatgaaattgcttgaggataagccaggacagcagagcgccattgcagggttagaggcacggatgggagttatgtattacacagtggggaggtacgaggacgcaagaaacgcgtttgagagcgctgtgacaaagctacgggcagcaggtgagaaatctgccttcttcggtgttgtattaaaccagatgggactagcctgcgttcagcttttcaagattgatgaagcgggtgagctgtttgaagaagcaagaggtattcttgaacaagaacgtggaccgtgcgatcaggacactctcggtgtttatagcaatctagctgctacctatgacgctatgggaaggtaaagtcctaaagaaaactatctgactatgtaattagatcagacatccttaatgaaacattaaagtctttcttcgtgatggctatgtaatttgcaggatagaggatgcgattgagatattagagcaggttctgaagctgagagaggaaaagctcgggactgcgaatccggattttgaagacgagaagaaacgtttggccgagcttttgaaggaagctgggcggtcgcggaactacaaagccaagtcgctccagaatctgattgatccaaatgcaagacctccgaagaaagagtcttctgctaagaaatggcccagcctcggtttcaagttctgaggaaaaaattatcatataaaataaatcatccacatatatattcaatattttattttattgttattgttatattttttatctgatctattttctgtatcataatctgaggttgatgaattaatttcatgtatagtgtttttatttgagtttggtgaaatactgccaagatggtgagctgtttgtttgagtttgaaatttctttaattcaatcacttttttcttc

SEQ ID NO: 104 - DNA, 1337 bp, Arabidopsis thaliana
  source 1..1337: mol_type = genomic DNA
ttaaagtaatgacttttttttatatgatatattctcaattttgttactcggaaacaatagaaaggataacgaatcgtttctcttcgatcgaaagaatatatatttggaagttttctctgcttttttgttttcgtttgatagaatgggaacagttctcgattcgcattttctggctctcactgctattgtcactgtgatttaccagttcatattcttcgtaatcacggctcttttcaaatttgatcaagtcactgactttgctggtagcacaaacttcgttatacttgctgtgttaacacttgttctcaaagcctcttggcattttcgacagatagtattgactttgctagttgtggtatggggtcttcgcttggggattttccttctaatgaggatcttgcaatggggggaagatcgtcgctttgatgaacagcgtggaaatatagtgagactaatcattttctggactcttcaggctgtgtgggtttggacggttagcttacctttaacacttgttaatgcaagtgatggtggtggatctcttaaacccgcagatgttatcggttggactatgtgggttttcggtttcttgattgaagctgcagctgatcaacagaagctatcattcaaaaactctcctgaaaacagaggaaaatggtgtgatgttggagtctggaagtattcaagacatccaaactacttcggtgagatgttactgtggtggggaatctttgtggctgcatcgcctgtgcttgaaggtgcagagtatcttgtcatattcggaccactctttctcactttgctacttctattcgtcagcggcataccattactcgaggcatcggctgacaaaaaacatggaaactcaggagcttacagatcctacaagaagacaacaagtcctctgattctgttcccaagaggagtgtatgggaacttaccaggatggttcaagacggtctttctcttcgagtttccattttacagccgaaatctccctcaagagggtagactccaaaacagcaaagagaaagaagtaaaagatgactgatttgtgatactcatatttgagttattgttcttcacaacactctttgataaaatttgtgtaaaaaattgcccgtaagaaactgaatttgtttgaaatattggacagtcttgacagattatctcagttgtatttggttcttttttttatgtgattttgttttttggttaaaaaaagttcccattccaagaatcgaacccgggtctcctgggtgaaagccaaatatcctaaccgctggacgacatcggatttgattatttgattatttaattactttatatgttgattt

SEQ ID NO: 105 - DNA, 1079 bp, Arabidopsis thaliana
  source 1..1079: mol_type = genomic DNA
gaagagtaagagtaaaaaacaaaaccttcgtctctaacaaatgtgtggcagctgattgaaactagtagtggtgaaggagaaggagaatgggagatctctacgctttggacttcgatggagttctctgtgatagttgtggagaaagctctctatctgctgttaaggcagccaaagtgagatggcctgatttgttcgaaggagttgattccgctttagaggaatggatcgtcgatcaaatgcatattgtgagacctgtggttgaaactggctatgaaaatcttctacttgtgcggctgttattggagaccaagataccgtctattcgaaaatcttcagttgcagaggggttgacggttgatgggatactggagagctgggcaaagtttaagcccgtgatcatggaagcttgggatgaagatagagatgctttggtagatttgtttggaaaagttagagatgattggattaacaaggacttgacaacttggattggtgccaatagattctacccaggagtttcagatgcactgaaatttgccagctcaaagatttatatcgttaccacgaaacagggccgctttgcagaagcgttactgcgtgaaatagcaggtgtaatcataccatcagaaaggatttatggtttgggttcagggccaaaggtggaagttctaaagctacttcaagataaaccagaacatcagggcttgacgctgcatttcgtggaagacagactcgcaacgctgaaaaatgtcataaaagagcctgaattagacaaatggagtttatacctaggaacctggggatacaacactgagaaagagagagctgaagcagcaggcattcccaggattcaggttattgagctctccacgtttagcaataagcttaaatgagtgcatatactcattggaaaagaaacaaagctttcctctttattgtattctacggcattcaacggaaactaaaaaccaaacatgtttaggtaagattcagtaaaagagttgaactttcagtactacccattatagaagcttttctgtgacctataattcatccttagtaagatcattcttgttacc

SEQ ID NO: 106 - DNA, 1064 bp, Arabidopsis thaliana
  source 1..1064: mol_type = genomic DNA
gaagagtaagagtaaaaaacaaaaccttcgtctctaacaaatgtgtggcagctgattgaaactagtagtggtgaaggagaaggagaatgggagatctctacgctttggacttcgatggagttctctgtgatagttgtggagaaagctctctatctgctgttaaggcagccaaagtgagatggcctgatttgttcgaaggagttgattccgctttagaggaatggatcgtcgatcaaatgcatattgtgagacctgtggttgaaactggctatgaaaatcttctacttgtgcggctgttattggagaccaagataccgtctattcgaaaatcttcagttgcagaggggttgacggttgatgggatactggagagctgggcaaagtttaagcccgtgatcatggaagcttgggatgaagatagagatgctttggtagatttgtttggaaaagttagagatgattggattaacaaggacttgacaacttggattggtgccaatagattctacccaggagtttcagatgcactgaaatttgccagctcaaagatttatatcgttaccacgaaacagggccgctttgcagaagcgttactgcgtgaaatagcaggtgtaatcataccatcagaaaggatttatggtttgggttcagggccaaaggtggaagttctaaagctacttcaagataaaccagaacatcagggcttgacgctgcaactcgcaacgctgaaaaatgtcataaaagagcctgaattagacaaatggagtttatacctaggaacctggggatacaacactgagaaagagagagctgaagcagcaggcattcccaggattcaggttattgagctctccacgtttagcaataagcttaaatgagtgcatatactcattggaaaagaaacaaagctttcctctttattgtattctacggcattcaacggaaactaaaaaccaaacatgtttaggtaagattcagtaaaagagttgaactttcagtactacccattatagaagcttttctgtgacctataattcatccttagtaagatcattcttgttacc

SEQ ID NO: 107 - DNA, 1133 bp, Arabidopsis thaliana
  source 1..1133: mol_type = genomic DNA
gcagctgattgaaactagtagtggtgaaggagaaggagaatgggagatctctacgctttggacttcgatggagttctctgtgatagttgtggagaaagctctctatctgctgttaaggcagccaaagtgagatggcctgatttgttcgaaggagttgattccgctttagaggaatggatcgtcgatcaaatgcatattgtgagacctgtggttgaaactggctatgaaaatcttctacttgtgcggctgttattggagaccaagataccgtctattcgaaaatcttcagttgcagaggggttgacggttgatgggatactggagagctgggcaaagtttaagcccgtgatcatggaagcttgggatgaagatagagatgctttggtagatttgtttggaaaagttagagatgattggattaacaaggacttgacaacttggattggtgccaatagattctacccaggagtttcagatgcactgaaatttgccagctcaaagatttatatcgttaccacgaaacagggccgctttgcagaagcgttactgcgtgaaatagcaggtgtaatcataccatcagaaaggatttatggtttgggttcagggccaaaggtggaagttctaaagctacttcaagataaaccagaacatcagggcttgacgctgcagtaactcacgttctatatatctatcaataattcttctatctgcatgacttggtaatggtcaccattagtttacaatccctatgcatttttaatttggccagtttcgtggaagacagactcgcaacgctgaaaaatgtcataaaagagcctgaattagacaaatggagtttatacctaggaacctggggatacaacactgagaaagagagagctgaagcagcaggcattcccaggattcaggttattgagctctccacgtttagcaataagcttaaatgagtgcatatactcattggaaaagaaacaaagctttcctctttattgtattctacggcattcaacggaaactaaaaaccaaacatgtttaggtaagattcagtaaaagagttgaactttcagtactacccattatagaagcttttctgtgacctataattcatccttagtaagatcattcttgttacc

SEQ ID NO: 108 - DNA, 700 bp, Arabidopsis thaliana
  source 1..700: mol_type = genomic DNA
acatcttctcttttcttccccagcaaaaaatgagtctgcaaaatagaaaattcaagctgcgattgcgaggaagagaagagacttcagatctagcttgatccggtgataatggcgctcgagtgggtggttttaggttacgcggcggcggctgaagcgattatggtggtgctattgacgatgccaggactcgacggactccgcaagggattagtcgccgtcacgcgtaatctcctcaaaccgtttctctccatagttcctttctgtctcttcctcttaatggacatctactggaaatacgaaactatgccttcgtgcgatggcgattcctgcacaccgtcagagcatcttcgtcaccagaagtccatgatgaaatcccagcgaaacgcgcttctcattgcggctgcacttgtgttctactggatcctttactcagtcaccaatttggttgtcaagatcgagcatcttaaccagaggatcgagaggctcaggaacaaggattgatcgtctcgtctcaggttcaattagtgtaatgccttttttggttatctttcccatttggctaggttttctctttttcaacgtttctgatatgtgtcttttatcttgtggagattgaaggattttatcctacttttctatgtttggattcttatttgtaaccagattgtgattgtttcttgttgaattttgattgactcta

SEQ ID NO: 109 - DNA, 1754 bp, Arabidopsis thaliana
  source 1..1754: mol_type = genomic DNA
tctccacaaacaaacttgtactagaaaaatccctaaatctcaacaaaaccctaatttcaaggaagacgaagaaagaatgagttacagagtcgctaaagcatcgcagtatcttgcgatcaccggtggtgggatcacagacatcaagcttgcaaagaagtcttgggtgtttccatggcagtcttgcaccgtcttcgacgtttctccggtgaactacacgttcgaggttcaagctatgagttccgagaaacttccctttgttattcctgctgttttcacaatcggtcctcgcgttgatgatcctcacgctctcttgttgtatgccatgcttatgtctcaacacgataagcactcgaatcacgtcaatgagcttgttcagggtgttatcgaaggagagactcgtgttcttgttgcttccatgactatggaagaggtcttcaaaggaacaaaggagtttaagaaggaagtgtttgacaaggttcagctagagctaaaccagtttggtcttgtgatctacaacgccaatgtgaagcagcttgttgatgtgcctggacatgagtacttctcttacttgggccagaagactcagatggaagcagcaaaccaagccaagatcgatgtagcagaggcaaagatgaagggagaggttggtgccaaagaaaggactggactcacaatccagaatgcagccaagattgacgctgagtcaaagatcatctctactcaaaggctaggagaagggacaaaagaggagatcaaggtgaagactgaagtcaaagtgtttcagaatgagaaagaggctcttgttgctaaggctgatgcagcacttgcgattcaaaaggctgctttgtcccaaaactctcgtgtggctgaggttgaagcagccaaggctgttgctttgagggaagctgagcttcagactaaagtagagaagatgaatgcattgactcggacagagaagcttaaagctgagttcctcagtaaagccagtgttgagtatgaaactaaggtgcaagaagcgaactgggagttgtacaataagcaaaagcaagcagaagctgttctttacgagaagcagaagcaagcggaagcgacgaaagctgcagctgatgctgccttctattcaaaacagaaagatgcagagggacttgtcgcaatggccgatgctcaggggacttacctcaagaccctcttaggcgcagttaacaatgattactcagccatgagagacttcttgatgatcaacaatggcatttatcaggatattgccaagaccaatgctgttgcgatcagggacctgcagcctaagatcagcgtgtggaaccatggtggtgctgagcaggggatgaacggtggtggtaaagctacgatgaacgatattgctggactctacaagatgttaccaccggttcttgatacggtttatgagcagacagggatgcagccaccagcttggattggtacattgcgtggtgctgagcccaaacaatcacttcatgctcaacaacacagaggttgagatctcaaatgttgcttctttaattatacttttagctgttggggtttgttttctttttcttatgttatagaacttggaagttagagtttgaagttaaaacaatagtatctgacaaatgcgacttcgactagtgatttcgataaggatgtgtttttcctttttcaaatgtcagatttattattgcgtgttgaagatacctttcttctctcttgatacactaatataaataacatgttta

SEQ ID NO: 110 - DNA, 683 bp, Arabidopsis thaliana
  source 1..683: mol_type = genomic DNA
cacagaaccctccctctctagctctaaaaacatcccacaaactatctttcaacaacacaagacatatcacgaaacaaatcaaagcaaagatcatgaacacgattccagccgaactcactggatacttccactatctaccaccagataaatataataaccaaacaccaatcatggagtctgagtacttcaacatgccctcttctcctacttcttgttcctccttctaccacctcaatggtctgatcaacaacaacaactactcttcatcatccaatggtcaggatctaatgacgagcaacaactcaacttcagacgaagatcaccaacaaagtatggtcatcgatgagaggaaacaaaggagaatgatctctaacagggaatctgctcgtaggtcaagaatgagaaagcagagacatctcgatgagctttggtctcaagtgataagacttcgcactgataaccactgtcttatggataagctgaaccgcgtatctgaaagccatgagcttgctttaaaggagaacgctaagcttaaagaggaaacttctgatctcagacagctgatctctgagataaagtcacacaacgaagacgacaacagttttttaagagagctcgaagattcgatatcaaactctagatcggattcgaaccaaagcggcagagattttgagttgtgttaa

SEQ ID NO: 111 - DNA, 432 bp, Arabidopsis thaliana
  source 1..432: mol_type = genomic DNA
taagctagaggtttttagttctctgtgtggagtacggctgcattgtttctaccagtaatttgtgggatttccaagctccagtttttcgaatatggcggaagtaagtcttggtatgcttatagacattgtggacgaagagtggatgagggacactttgcctgatgatgatcttccattgcctccagtgcttgctgttaaaactgatgatactgaagaaaccaatcaggaaactcagcaagcagatgctgaaacttggcgtgatctagctcttgatacacagtaatagcctcttaagtacaatggaaaattcttacaagtcttgtttctcgttgtgtatgatcaaaaccaaaactgttcctggctttgtatttttttttggtagaagaggggggcgaacccccatttttattaaaactgaaaaactaaaaaaaa

SEQ ID NO: 112 - DNA, 3538 bp, Arabidopsis thaliana
  source 1..3538: mol_type = genomic DNA
gaagtagaagaagagaagtatctggagagagagaggcgtgcgatttccgcatcgaagaaacagtacggagttttatccgctccgattctgtggaagataatggggaaaggaggtgaagattgcgggaataagcaaactaatagttctgaattggtcaagtctgatacttttcctgcttggggtaaagatgtgtcggaatgcgaagagaagtttggtgttagtcgtgagaaaggtttgagcactgatgaggtgttgaaacggcatcagatctatggtttgaatgaattagagaagcctgagggtacttctatttttaagctgattttggaacagtttaatgatacattggttcgtattcttttggcggctgctgttatttcctttgtcttagccttctttgatggcgacgaaggtggtgagatgggtatcaccgcatttgttgagccgcttgttatttttctcatcttgattgttaatgccattgttggcatctggcaagaaactaatgctgagaaggcgttggaagctttgaaagagattcagtctcagcaagctaccgtcatgcgtgatgggactaaggtttccagtttgcctgcaaaggagcttgttcctggtgatattgtggaactgagggttggtgataaggtgcctgctgatatgcgtgtggttgctttgatcagttcaactttgagagtcgagcaggggtccttaacaggagagagtgaggcagtgagcaaaaccaccaagcacgtggatgagaatgctgatattcaaggaaagaaatgcatggtgtttgcaggaaccactgtcgtgaatgggaactgcatatgtttagttacagatactgggatgaatactgagattggaagggttcactcacagatccaggaagctgcacaacacgaggaagatacccctctgaagaaaaaacttaacgagtttggggaagttctgactatgatcattgggttaatttgtgcgttagtgtggctcatcaatgtcaaatactttctgtcatgggagtatgttgatggctggcccagaaactttaagttctccttcgagaagtgcacatattactttgagattgctgttgcactggcggttgctgcaattccagaaggtctgccagcagttattaccacatgtttggctcttggcactaggaagatggctcagaagaatgctctggttaggaagctacccagtgtggagactcttggatgcaccaccgtgatatgctctgacaaaactggaactcttacaaccaatcagatggctgtttcaaagctcgttgctatgggttcgaggatcggaactcttcgatctttcaatgttgaggggacctcgtttgatcctcgagatggaaagattgaagattggccaacgggtcggatggatgcaaatcttcagatgattgcaaaaattgctgccatttgcaacgatgctaatgttgagaaatctgatcagcaatttgtgtctaggggcatgcctactgaggcagctttgaaggttttggttgagaaaatgggatttcccgaaggattgaatgaagcttcatccgatggcaatgtcttacgttgttgtcggctatggagtgaactagaacaacggattgccacccttgagtttgaccgtgaccggaaatcaatgggagttatggtggattccagctcaggaaagaaactgctactggtcaagggtgccgtagaaaatgtattggaaaggagtacccatattcagctacttgatggttccactcgagagcttgaccaatactcaagggatcttattttacaaagcctacatgatatgtccttgagtgcattaagatgtctcggatttgcatactcagatgttccatcagattttgccacttatgatggcagtgaagaccatcctgctcatcagcaacttctcaacccatccaattattcatcaattgagtccaatctagtatttgttggatttgttggtttaagggatcctccaaggaaagaggtgcgtcaagccattgcagactgcagaacagcaggtattcgggtcatggttatcaccggagacaacaagagcacagcggaagcaatctgccgtgaaattggcgtatttgaagcagatgaagatatctcctcgagaagcttgacaggaaaagaatttatggatgttaaagatcagaagaatcatctaagacagacaggagggctcctgttctcaagggctgaaccaaaacacaaacaagagattgtcaggttactgaaagaagatggagaagtggttgccatgactggagatggagtcaatgatgctcctgccctgaagttggctgatattggtgtggctatgggcatttccgggacagaggtagcaaaggaggcatctgacttggtgttggcagatgataatttcagcaccattgttgcagctgttggtgaaggcaggtccatctataacaacatgaaggccttcatcaggtacatgatctcttccaacatcggtgaggttgcatcgatattcttgacagctgctcttggaatcccagaaggcatgatacccgttcaacttctgtgggtgaatctcgtaacagatggtcctccagctactgctttgggattcaacccccctgacaaggatattatgaaaaagcctcctcgtaggagcgatgactctcttatcactgcgtggatcctcttccgctatatggtgattggtttgtatgtgggagtagcaacggtgggagtattcatcatatggtacacacacaacagctttatgggcatagacctgagccaagacggtcacagccttgtgagctattcacagctcgcacattggggccaatgctcttcatgggaaggcttcaaagtgtctcctttcacagcaggctctcagactttctcgttcgactcaaacccttgcgactattttcagcagggtaaaatcaaggcatccacactctccctctcggtgttggtggccattgaaatgttcaactctctgaatgcactctcagaagatggcagcctggtgacgatgccaccctgggttaacccgtggctgctcctggcaatggctgtctcatttggactccactttgtgatattgtacgtcccattcttggctcaggtgtttggtattgtgccactgagcttgaacgagtggctgctagtgctggctgtgtcgctgccggtaattttgatagacgaagtgctcaagtttgtaggaaggtgcacgagtggctaccgctactcacctcgcactccctcagctaagcaaaaggaggagtaagaaaataattcaaaaggcattattattagactcttagttttagctgaaattaactttgttgctttactcatccttgctatatttaattctccaaacgataatttttggtttgaaaaagaaaagtttctaactttggttcatggacacagcccgtgatagaaagatgaatgtttcaaccaaaccttgattctttatgtaaacttttatggtcgaccaaattggtttttaagactgatggtaatttattttgggc

SEQ ID NO: 113 - DNA, 2087 bp, Arabidopsis thaliana
  source 1..2087: mol_type = genomic DNA
ataaacctacttcctttccttgcttcagctccccttttcttatccggaaaccaaaaacttccggtgataaaacctccttcgtcatctctctacttcttgctgaattttgtctgtctttgaagtggataaaatggcgtcaactttcactgccacatcttctattggttcaatggttgctccgaatggtcacaaatctgataagaaacttatcagcaagttgtcttcaagctcatttggaaggagacaaagtgtgtgtcctagacccagaagatccagttctgcaattgtgtgcgcagcaaaggaattacatttcaacaaagatgggactaccattaggagacttcaagctggtgtcaacaagctcgcagatcttgttggtgttacacttggacccaaaggacgaaatgttgttcttgagagcaagtatggatcaccacgaattgttaatgatggtgtgactgttgcaagagaggttgagttggaagacccggttgagaacattggcgctaagcttgtgaggcaagcggctgccaaaaccaatgacttggctggtgacggtacaacaacatctgttgttcttgcacaaggttttatcgctgagggtgtcaaggtggtagctgctggtgcaaaccctgttttgatcaccagaggtattgagaagacagcaaaggctttggttaccgagctcaagaaaatgtctaaggaggttgaagacagtgaacttgcagatgttgcagctgttagtgcgggtaacaacgacgaaattggaaatatgattgctgaagcaatgagcaaagtgggcaggaaaggtgtggtgacccttgaggagggtaaaagtgccgagaacaacctctacgtcgtagaaggaatgcaatttgaccgtggttatatctctccttactttgtgacagacagcgagaaaatgtccgtcgagttcgacaattgcaagttacttctcgttgacaagaaaattaccaatgcaagggatcttgttggtgttttggaggatgcaattagaggcggatacccaatattaattattgctgaagacattgaacaagaagctttagcgactcttgttgtaaacaagcttagaggtacactgaagatagcagctctcagagctccagggtttggagagcgcaagagccaataccttgatgatattgccattctaactggagcaactgtgatccgtgaggaagttggtctttcacttgacaaagctggaaaagaggttcttggtaatgcttcaaaggttgtcctcacaaaggagacctcgaccatagtgggtgatggaagcacacaggatgcagtgaaaaagcgtgttacacagattaaaaatcttattgagcaagcggagcaagattacgagaaggagaaactcaatgagagaattgcaaagctctctggtggagttgctgtgattcaggttggagcacaaactgagacagaactcaaagagaagaagttgagagttgaagatgctcttaatgcaacaaaggccgctgtcgaggaaggtattgttgttggtggtggttgcactctgcttcgtcttgcttccaaggttgatgccattaaagccacgcttgataatgatgaagaaaaggttggagcggatatagttaaaagagcactaagttaccccctaaaactaatcgccaagaatgctggtgttaatggaagtgtagttagcgagaaggtgctttccaacgataacgtgaaattcggttacaatgctgcaaccggcaagtacgaggatttgatggctgcaggaatcatcgatccaacaaaggttgtgagatgttgcttggaacacgcagcttcggttgcaaagactttcttgatgtcggactgcgttgttgttgagatcaaggaacctgaaccagttcccgtcggcaacccaatggacaactcaggatatggatactaagaggagataggctaatattgaaacggattactttagcttgcgagtgtaatgattttgaacaagagaatgtgtaatgtgaaactgaaattttgaattaatcatcatatgaataaatcatgattccctcaatgcttcgaaatatctcgaaatcgcc

SEQ ID NO: 114 - DNA, 2093 bp, Arabidopsis thaliana
  source 1..2093: mol_type = genomic DNA
ttaaaagcaccttccaagcgagagtaaggagataaacctacttcctttccttgcttcagctccccttttcttatccggaaaccaaaaacttccggtgataaaacctccttcgtcatctctctacttcttggataaaatggcgtcaactttcactgccacatcttctattggttcaatggttgctccgaatggtcacaaatctgataagaaacttatcagcaagttgtcttcaagctcatttggaaggagacaaagtgtgtgtcctagacccagaagatccagttctgcaattgtgtgcgcagcaaaggaattacatttcaacaaagatgggactaccattaggagacttcaagctggtgtcaacaagctcgcagatcttgttggtgttacacttggacccaaaggacgaaatgttgttcttgagagcaagtatggatcaccacgaattgttaatgatggtgtgactgttgcaagagaggttgagttggaagacccggttgagaacattggcgctaagcttgtgaggcaagcggctgccaaaaccaatgacttggctggtgacggtacaacaacatctgttgttcttgcacaaggttttatcgctgagggtgtcaaggtggtagctgctggtgcaaaccctgttttgatcaccagaggtattgagaagacagcaaaggctttggttaccgagctcaagaaaatgtctaaggaggttgaagacagtgaacttgcagatgttgcagctgttagtgcgggtaacaacgacgaaattggaaatatgattgctgaagcaatgagcaaagtgggcaggaaaggtgtggtgacccttgaggagggtaaaagtgccgagaacaacctctacgtcgtagaaggaatgcaatttgaccgtggttatatctctccttactttgtgacagacagcgagaaaatgtccgtcgagttcgacaattgcaagttacttctcgttgacaagaaaattaccaatgcaagggatcttgttggtgttttggaggatgcaattagaggcggatacccaatattaattattgctgaagacattgaacaagaagctttagcgactcttgttgtaaacaagcttagaggtacactgaagatagcagctctcagagctccagggtttggagagcgcaagagccaataccttgatgatattgccattctaactggagcaactgtgatccgtgaggaagttggtctttcacttgacaaagctggaaaagaggttcttggtaatgcttcaaaggttgtcctcacaaaggagacctcgaccatagtgggtgatggaagcacacaggatgcagtgaaaaagcgtgttacacagattaaaaatcttattgagcaagcggagcaagattacgagaaggagaaactcaatgagagaattgcaaagctctctggtggagttgctgtgattcaggttggagcacaaactgagacagaactcaaagagaagaagttgagagttgaagatgctcttaatgcaacaaaggccgctgtcgaggaaggtattgttgttggtggtggttgcactctgcttcgtcttgcttccaaggttgatgccattaaagccacgcttgataatgatgaagaaaaggttggagcggatatagttaaaagagcactaagttaccccctaaaactaatcgccaagaatgctggtgttaatggaagtgtagttagcgagaaggtgctttccaacgataacgtgaaattcggttacaatgctgcaaccggcaagtacgaggatttgatggctgcaggaatcatcgatccaacaaaggttgtgagatgttgcttggaacacgcagcttcggttgcaaagactttcttgatgtcggactgcgttgttgttgagatcaaggaacctgaaccagttcccgtcggcaacccaatggacaactcaggatatggatactaagaggagataggctaatattgaaacggattactttagcttgcgagtgtaatgattttgaacaagagaatgtgtaatgtgaaactgaaattttgaattaatcatcatatgaataaatcatgattccctcaatgcttcgaaatatctcgaaatcgcc

SEQ ID NO: 115 - DNA, 1960 bp, Arabidopsis thaliana
  source 1..1960: mol_type = genomic DNA
gtgaacgaagataaatttcgctattcctctctctctctctctctctctctctctctctctctctcttcttcttcttctccgttcgtgctctggactcgctcgaaatcgatccgatgataatttatgcagctcgaaacttaatttagaatcatacctttttctggatttggctgacgaatccgttttcaattgcacgagttgcttcgccaggtttatcaacttaagaatgtctaattatcaaggggatgatgctgagtacatggaagatgtggatgatgaaatggatgaggatgatttagatgaggattttcgtggggatgatatggctgcctctgattccgatgtcgatgagtttgactactctaataataaaatagctgacacttcagctgaccaagcccggaaagggaaagacatccaggggattccttgggacaggcttagtattacgagagagacatacagacaaactagactagaacagtataaaaattatgaaaatgtccctaactctggggaatcttcagggaaagattgcatggccacacagaaaggggctcttttttatgatttctggcggaatacaagatctatcaaatcaagtattcttcatttccagttgaggaatttggtttgggcaacttctaagcacgatgtctaccttatgtcacaatatttggtgagccactattctactttgacatccggaaagcatgatgttctcaatgttcaaggtcatgtttccccatctgagaaacatcctggaagtttgttggagggatttacaaagactcaagtgagtacactcgcagtgagagataaatttttagttgccggtggatttcaaggagaacttatatgcaagcatcttgatagacctggtgtgagcttttgttcacgtactacttatgatgataatgctataaccaatgctattgagatttataacaaacccagtggggcacttcattttactgcgtcgaataatgattgtggagtcagagattttgatatggagagataccagcttgttaaccagtttcgctttccatggccggtgaatcacacatctttaagtcctgatggtaaattgttgacgattgtgggagacaaccctgaaagccttctggtagaccccaacactggaaagacactggcaacgctatcaggacatctggacttttcctttgcatcagcatggcacccagatggattcacgttctccacaggtaaccaggacaagacctgccgggtttgggacattcgtaacctgtcaaaatctgttgctgtcttgaggggtaaccttggagcaatccgatccattcgctacacatctgatgggaagtacatggccatggctgagccggctgactttgtccatgtgtatgatgtctcaaacgggtatgaaacggagcaagagatcgacttctttggggagatctcgggaatatcatttagccccgacacagaagcactcttcataggcgtttgggaccgcacttacggaagtctaattgagtatagccggcgccacaactactcctaccttgattcatttctatgatcacccgacataccagaggaataaaagagccgatacatatgtgctgctgcactctcctgtcgctctgttaaactaagaaacccgagaaaagagaaaacataaactcaagtcgatctctaatggtgtaaatgatgtgttgtgcaagtactagtaggaatgttgtcacagagagcggatttagttagttaatgttcatttcttgtatgagtgttggagttcgtgtattgtacataagtatatgaggttcgggtgagtttgcatcaagtctcaactcttggcaaagagacaactttactcgagtctgtggctcgttatttggctatggtcacttgtagaggaactcaatttgagatgtttctgccgattgttggatcaaattatatatcatgatgtttc

SEQ ID NO: 116 - DNA, 2741 bp, Arabidopsis thaliana
  source 1..2741: mol_type = genomic DNA
aatcggcgcgtgatcgagaaagatcttctttaacctctttgcaacaaatctactcaaaaccctaacccctttttcaaattacttccatctttagatcgaatcaaatcaatgtccgtcgacgatctccctccgtcgtcggcctccgccgtaacgccactaggctcctccgtgattccgattgtgaacaagctccaagacatattcgctcagctaggaagtcaatcgacgatcgctcttccgcaagtagctgtcgtcggaagtcaaagcagtggcaaatccagcgttctagaagctctcgtcggccgtgactttcttcctcgtggcaatgatatttgcacgcgccgacctctccgtctccagcttgttcagacgaaacctagctctgatggtggatccgatgaagagtggggcgagtttcttcaccacgatcctgttagacgtatctacgatttctctgagattcgccgtgagattgaggcggagactaatagagtatcaggagagaacaaaggtgtatcagatattccgattggtttgaagatattttcacctaatgttttggatattagtcttgtggatcttcctggtatcactaaggttcctgttggtgatcagccaagtgatatcgaagcgcgtataagaacgatgatcttgacttacattaaggaacctagttgcttgatacttgctgttagccctgctaatactgatttagcaaattcagatgcattacaaatcgcaggaaatgctgatcctgatggtcatagaaccataggtgtaatcacaaagttggatattatggacagaggtactgatgctcggaatcaccttctgggaaaaacaattcctcttcgacttggatacgtgggagttgtaaatcgtagtcaagaggatattttgatgaaccgtagcatcaaggatgctcttgttgcagaggaaaagttctttcgtagtcgtccagtttacagcggtctcacagatcgtttgggtgtccctcaactggcaaagaaattaaatcaggtccttgttcaacacatcaaggcactgcttcctagtttaaagtcacgtatcaacaatgcattgtttgctacagcaaaggagtatgagagctatggggatataacagagtctaggggtggtcaaggagctcttctcctcagttttattacaaaatactgcgaagcatactcctctaccctggaagggaaaagtaaagaaatgtcaacatctgagctctcgggtggagcaagaattctctacattttccaatcagtatttgttaagagcttagaggaggttgatccatgtgaagacttaacagctgatgatattcggactgcaatacaaaatgcaactggtcccagatctgcattatttgttccagatgttccatttgaagttcttgtcaggaggcaaatatctcgtttattagatcccagccttcagtgcgctaggttcatcttcgatgagctagtaaagattagtcatcagtgtatgatgaaagagttacagcggtttccagtcctgcaaaagcgcatggatgaggttattgggaactttctgcgagaaggtcttgaaccttcgcaggcaatgatccgagatcttattgaaatggagatggattatataaacacctcacacccaaattttatcgggggaactaaagccgtggagcaagcaatgcaaacagtcaaatcttctaggattccgcatcctgttgcgcggccaagggatactgtggagcctgagaggacggcttcttccgggagtcaaataaaaacccgatcttttctcggccgacaagctaatggaatcatcactgatcaggcagttccaactgcagcagatgctgaaagacctgcaccagctggaagcacaagctggagtggtttctcatcaatttttcgggggagtgatggtcaggcagctgctaaaaacaacctattaaacaaaccattcagcgaaactactcaagaagtgtatcagaacttgtcaacaatctatttaaaggagcctccaactattttgaagtcatctgaaactcattcagaacaggagtcagttgagattgagataacaaagctattattgaaatcctactatgacattgtaaggaagaatgtcgaggacttggtcccaaaagcaatcatgcattttctggtaaattacacgaaacgtgagctgcacaatgttttcatcgagaagctttacagggagaacttaattgaagaactgttgaaagagcccgatgagttagcgataaagaggaaacgcacgcaagagactcttcgcattcttcagcaggctaatcggacgttagacgagctgccgttagaagctgaatcggtcgagagaggttacaaaattggttcagaagcgaaacatgaggagttaccgggcacaagaagatcaaggacagaaactaatgggaacggacggcttcatatgtaaattcaaattgtgattgcacgcatgactcattcatttggtgatggaaaagatttgttttcttccctttaaatcggttgtgcgtggggaaagaaaggtgttcttaggtatagtgaaacgtgatgataaacagaggttttgttgtgagggtattatcaacctactggaaaatgtgacttaatatttgtttctcaaaaccgagaagaataatcaattcctaattttacttttcatagctttatttgttacgaaaaacaagaacgtacatgagacaatgtaatgataaatttatc

SEQ ID NO: 117 - DNA, 2749 bp, Arabidopsis thaliana
  source 1..2749: mol_type = genomic DNA
gagaaagatcttctttaacctctttgcaacaaatctactcaaaaccctaacccctttttcaaattacttccatctttagatcgaatcaaatcaatgtccgtcgacgatctccctccgtcgtcggcctccgccgtaacgccactaggctcctccgtgattccgattgtgaacaagctccaagacatattcgctcagctaggaagtcaatcgacgatcgctcttccgcaagtagctgtcgtcggaagtcaaagcagtggcaaatccagcgttctagaagctctcgtcggccgtgactttcttcctcgtggcaatgatatttgcacgcgccgacctctccgtctccagcttgttcagacgaaacctagctctgatggtggatccgatgaagagtggggcgagtttcttcaccacgatcctgttagacgtatctacgatttctctgagattcgccgtgagattgaggcggagactaatagagtatcaggagagaacaaaggtgtatcagatattccgattggtttgaagatattttcacctaatgttttggatattagtcttgtggatcttcctggtatcactaaggttcctgttggtgatcagccaagtgatatcgaagcgcgtataagaacgatgatcttgacttacattaaggaacctagttgcttgatacttgctgttagccctgctaatactgatttagcaaattcagatgcattacaaatcgcaggaaatgctgatcctgatggtcatagaaccataggtgtaatcacaaagttggatattatggacagaggtactgatgctcggaatcaccttctgggaaaaacaattcctcttcgacttggatacgtgggagttgtaaatcgtagtcaagaggatattttgatgaaccgtagcatcaaggatgctcttgttgcagaggaaaagttctttcgtagtcgtccagtttacagcggtctcacagatcgtttgggtgtccctcaactggcaaagaaattaaatcaggtccttgttcaacacatcaaggcactgcttcctagtttaaagtcacgtatcaacaatgcattgtttgctacagcaaaggagtatgagagctatggggatataacagagtctaggggtggtcaaggagctcttctcctcagttttattacaaaatactgcgaagcatactcctctaccctggaagggaaaagtaaagaaatgtcaacatctgagctctcgggtggagcaagaattctctacattttccaatcagtatttgttaagagcttagaggaggttgatccatgtgaagacttaacagctgatgatattcggactgcaatacaaaatgcaactggtcccagatctgcattatttgttccagatgttccatttgaagttcttgtcaggaggcaaatatctcgtttattagatcccagccttcagtgcgctaggttcatcttcgatgagctagtaaagattagtcatcagtgtatgatgaaagagttacagcggtttccagtcctgcaaaagcgcatggatgaggttattgggaactttctgcgagaaggtcttgaaccttcgcaggcaatgatccgagatcttattgaaatggagatggattatataaacacctcacacccaaattttatcgggggaactaaagccgtggagcaagcaatgcaaacagtcaaatcttctaggattccgcatcctgttgcgcggccaagggatactgtggagcctgagaggacggcttcttccgggagtcaaataaaaacccgatcttttctcggccgacaagctaatggaatcatcactgatcaggcatttccaactgcagcagatgctgaaagacctgcaccagctggaagcacaagctggagtggtttctcatcaatttttcgggggagtgatggtcaggcagctgctaaaaacaacctattaaacaaaccattcagcgaaactactcaagaagtgtatcagaacttgtcaacaatctatttaaaggagcctccaactattttgaagtcatctgaaactcattcagaacaggagtcagttgagattgagataacaaagctattattgaaatcctactatgacattgtaaggaagaatgtcgaggacttggtcccaaaagcaatcatgcattttctggtaaattacacgaaacgtgagctgcacaatgttttcatcgagaagctttacagggagaacttaattgaagaactgttgaaagagcccgatgagttagcgataaagaggaaacgcacgcaagagactcttcgcattcttcagcaggctaatcggacgttagacgagctgccgttagaagctgaatcggtcgagagaggttacaaaattggttcagaagcgaaacatgaggagttaccgggcacaagaagatcaaggacagaaactaatgggaacggacggcttcatatgtaaattcaaattgtgattgcacgcatgactcattcatttggtgatggaaaagatttgttttcttccctttaaatcggttgtgcgtggggaaagaaaggtgttcttaggtatagtgaaacgtgatgataaacagaggttttgttgtgagggtattatcaacctactggaaaatgtgacttaatatttgtttctcaaaaccgagaagaataatcaattcctaattttacttttcatagctttatttgttacgaaaaacaagaacgtacatgagacaatgtaatgataaatttatcactggtaagttgatcttgttctt

SEQ ID NO: 118 - DNA, 2836 bp, Arabidopsis thaliana
  source 1..2836: mol_type = genomic DNA
gagaaagatcttctttaacctctttgcaacaaatctactcaaaaccctaacccctttttcaaattacttccatctttagatcgaatcaaatcaatgtccgtcgacgatctccctccgtcgtcggcctccgccgtaacgccactaggctcctccgtgattccgattgtgaacaagctccaagacatattcgctcagctaggaagtcaatcgacgatcgctcttccgcaagtagctgtcgtcggaagtcaaagcagtggcaaatccagcgttctagaagctctcgtcggccgtgactttcttcctcgtggcaatgatatttgcacgcgccgacctctccgtctccagcttgttcagacgaaacctagctctgatggtggatccgatgaagagtggggcgagtttcttcaccacgatcctgttagacgtatctacgatttctctgagattcgccgtgagattgaggcggagactaatagagtatcaggagagaacaaaggtgtatcagatattccgattggtttgaagatattttcacctaatgttttggatattagtcttgtggatcttcctggtatcactaaggttcctgttggtgatcagccaagtgatatcgaagcgcgtataagaacgatgatcttgacttacattaaggaacctagttgcttgatacttgctgttagccctgctaatactgatttagcaaattcagatgcattacaaatcgcaggaaatgctgatcctgatggtcatagaaccataggtgtaatcacaaagttggatattatggacagaggtactgatgctcggaatcaccttctgggaaaaacaattcctcttcgacttggatacgtgggagttgtaaatcgtagtcaagaggatattttgatgaaccgtagcatcaaggatgctcttgttgcagaggaaaagttctttcgtagtcgtccagtttacagcggtctcacagatcgtttgggtgtccctcaactggcaaagaaattaaatcaggtccttgttcaacacatcaaggcactgcttcctagtttaaagtcacgtatcaacaatgcattgtttgctacagcaaaggagtatgagagctatggggatataacagagtctaggggtggtcaaggagctcttctcctcagttttattacaaaatactgcgaagcatactcctctaccctggaagggaaaagtaaagaaatgtcaacatctgagctctcgggtggagcaagaattctctacattttccaatcagtatttgttaagagcttagaggtaatcactgtgtgtagatatctttgtttagttagtggggctatttgcacggaaggcagacagttcgtttcaggttttcagttcttggaagttgatccatgtgaagacttaacagctgatgatattcggactgcaatacaaaatgcaactggtcccagatctgcattatttgttccagatgttccatttgaagttcttgtcaggaggcaaatatctcgtttattagatcccagccttcagtgcgctaggttcatcttcgatgagctagtaaagattagtcatcagtgtatgatgaaagagttacagcggtttccagtcctgcaaaagcgcatggatgaggttattgggaactttctgcgagaaggtcttgaaccttcgcaggcaatgatccgagatcttattgaaatggagatggattatataaacacctcacacccaaattttatcgggggaactaaagccgtggagcaagcaatgcaaacagtcaaatcttctaggattccgcatcctgttgcgcggccaagggatactgtggagcctgagaggacggcttcttccgggagtcaaataaaaacccgatcttttctcggccgacaagctaatggaatcatcactgatcaggcagttccaactgcagcagatgctgaaagacctgcaccagctggaagcacaagctggagtggtttctcatcaatttttcgggggagtgatggtcaggcagctgctaaaaacaacctattaaacaaaccattcagcgaaactactcaagaagtgtatcagaacttgtcaacaatctatttaaaggagcctccaactattttgaagtcatctgaaactcattcagaacaggagtcagttgagattgagataacaaagctattattgaaatcctactatgacattgtaaggaagaatgtcgaggacttggtcccaaaagcaatcatgcattttctggtaaattacacgaaacgtgagctgcacaatgttttcatcgagaagctttacagggagaacttaattgaagaactgttgaaagagcccgatgagttagcgataaagaggaaacgcacgcaagagactcttcgcattcttcagcaggctaatcggacgttagacgagctgccgttagaagctgaatcggtcgagagaggttacaaaattggttcagaagcgaaacatgaggagttaccgggcacaagaagatcaaggacagaaactaatgggaacggacggcttcatatgtaaattcaaattgtgattgcacgcatgactcattcatttggtgatggaaaagatttgttttcttccctttaaatcggttgtgcgtggggaaagaaaggtgttcttaggtatagtgaaacgtgatgataaacagaggttttgttgtgagggtattatcaacctactggaaaatgtgacttaatatttgtttctcaaaaccgagaagaataatcaattcctaattttacttttcatagctttatttgttacgaaaaacaagaacgtacatgagacaatgtaatgataaatttatcactggtaagttgatcttgttctt

SEQ ID NO: 119 - DNA, 3430 bp, Arabidopsis thaliana
  source 1..3430: mol_type = genomic DNA
aaactaaaataaataaggaaaacactcttcttcaaatccagtagagagattcaagacgagtctcatcgaaagttcgaatctttcgtcatctgattagctttctcttagggtttatttcgatttcgatttagtgttctccatcaatggcgacacccatggttagttccgctggaggattactagcaatgctcaacgagcctcatcctgttttgaagcttcatgcgctctctaacctcaacaatttggttgaccaattctggcctgagatctccactagtgtccccatcattgagagtttatatgaagatgaagaattcgatctgcatcaaagacagcttgctgctttgctggtctctaaggttttctattacttgggcgagcttaatgattcgctgtcttatgccctaggagccggtcccttatttgatgtttcagaggattctgattatgttcatacgcttctggccaaagcaatagacgaatatgccagtctcagatcaaaggcagttgagtcaaatgagatggtggacattgatcccaggctagaggcgattgttgaaagaatgcttggaaaatgcatcagtgatgggaagtatcaacaagccatgggcattgcgatagaatgccggagattggataagttggaagaagctatcattaagagcgataatgttcagggaactttatcatattgcatcaatgtttctcattcctttgtcaaccgcagagagtacagacatgaggtgcttagtttacttgtaaaagtctaccagaagctgccctctcctgattatttgagcatttgtcaatgcctcatgtttttggatgaaccgcaaggtgttgcaagcatattggagaagcttcttcgctcagagaacaaggatgatgctttattggcattgcaaattgcatttgatcttgtagagaacgagcaccaggcctttctcttgagtgttagagatcgccttccagctcccaaaacacgtgctgtagaagcaactcaggctgttgaaacaactattgctcctaatgagaacccttcgggagatgttcagatggcagatgaaactccagctcagacaattgtgcatgagacggatccagttgatgctacatatgctgagaggttaacaaagattaagggaattttatctggagagacatctattcagctgacactgcagtttctttacagccacaacaaatcggacctgctgatactgaagacaatcaaacagtctgtagagatgcggaacagtgtatgccacagtgctacaatatatgctaatgccattatgcatgctggaactacagtggacactttccttagagagaatttggattggctaagcagggcaaccaattgggctaagttcagtgctaccgcgggattaggtgttattcacagaggtcacctgcaacagggtaggtcattgatggctccatacttgcctcagggaggagcaggtggtggtgggagtccttattccgaaggaggtgctttatatgctcttggccttattcatgctaaccatggcgagggaatcaagcaatttctacgtgatagcctacgcagcactaatgttgaggtcattcaacatggagcttgtttaggtcttggcttgtcagctctcgggacagctgatgaagagatatatgatgatgtcaaaagcgtgctttatactgacagtgcagttgctggtgaagctgctggcatcagcatgggtttattattggttggaactgctactgaaaaggcaagtgagatgctcgcttatgctcatgagacacaacatgagaagataataaggggattggctctaggaatagctcttacagtatatggtagagaagaaggagcagataccttgattgagcagatgacgagagatcaggatccaatcattcgttatggtggcatgtacgcattggcattggcttacagtggaaccgcaaacaacaaggcaattcgacaattgctgcactttgctgtatctgatgtcagtgatgatgttaggaggactgccgttctggcacttggatttgtcttgtactctgatccagagcagactccccgtattgtatcactgctttctgagtcatacaatccacatgttcgctatggtgcggctcttgcagtgggtatttcttgtgcaggcactggcctcagcgaagcgatatccttgttggagccacttacatcagatgttgttgactttgttcgtcaaggtgctttgattgcaatggccatggtgatggttcaaattagcgaagctagcgattctcgtgttggagtatttaggcgccaacttgagaagattatacttgacaagcacgaagatacaatgagcaagatgggagcgattctggcctctggtatccttgatgctggtggtaggaacgttactataagactgctctctaagaccaaacatgacaaagtcactgctgttatcggccttgcagtcttcagccagttttggtattggtacccactgatctatttcattagtttggccttctcaccaaccgctttcatcggtttgaactatgaccttaaggtcccaaagtttgagttcatgtcacatgcaaaaccgtctttatttgagtacccaaaacccaccacggttcctacagccaataccgccgttaaacttccaaccgctgttctctcaacttcagttaaagccaaagctagggctaagaaagaagcagagcaaaaagctattgctgagaaaacatctggccctgaaaagcctgtcaatgaaagtggatctggaaaaggaaaagcatcaactgagaaggaaggagactctatgcaggtcgatagcccagcagcggtcgagaagaaagcacctgagcctgagccagcgtttgagattttagtgaacccagctcgagtagtcccagctcaagagaaatacataaagttacttgatgacagcagatatgtaccagtgaagctagcaccgtcaggtttcgttcttctcaaagacttgcgtgaacacgagccagaggttctctctctgaccgacgcaccaacttcaacagcttctcctgcaactggtacagcagcggctgcacaaggaaccccggcctcagctatggccgtagatgatgagccacaacctccacaagcctttgaatacgcttcatgattttatttcatttaaaattagtgggaatttgttgttggttttattggtttctgttgaaagacaaaaggcagagagaaaaacagatctttgaactttgagataactgcttcttgtcatttgcaactggtttcatgttcaactacgatcttgtattaggtacttctctttttaagtattatctaaataattaagtgtcgttttatgtcttttagtggtactggtatatctgatttcttctacaacaagatagtaataaactacattttctaagt

SEQ ID NO: 120 - DNA, 1570 bp, Arabidopsis thaliana
  source 1..1570: mol_type = genomic DNA
cctcttcctcttcaagccacaaagactcataaaaatccaacctttttctcatttcctctgttaaatttttcctgaaaagtttattcctttttctacagatcgaatttcgtagttctcacctcactgaatctgttactttctctataatctaaatcttcaaaaatgtttctggttttgtgaaatcaacacttaaaaactcgagcttttacctcctctgttttttcaaagataaaaatgagagaagacgattcagactggttcgcaagatgggaagaagaacttccatcaccagaagagctcatgccaatatcacaatctctaatctcacccgatctagctctagccttcgatatacgaaccccaaatcacggaaacggaaactcaaaccaacctcatcatcatcatcatcaccaaaccacacctcctacaccgtctcagcttcagcttccatcttctcaagccaattcctcagccgaattcgctgcagattcagcagatctaggctccggaggagctgccggagacgaaccagctcggactttaaaacgacctcgtcttgtctggacaccgcagctgcataaacgtttcgttgatgctgttgcgcatttagggattaagaacgcagttcctaaaacgattatgcagcttatgagtgttgatggtttaactagagaaaacgttgcgagtcatttgcaaaagtatagactttatcttaagagaatgcaaggtttgtcttctggtggtggtgctggttcagatccagctactgatcgtcttttcgctagctctcctgttcctgctcactttcttcatcctaatcgtgttcccagttctgatcatttcatgccgtcttttgttcctattgctactcttcaacaacaacaacaaatggctgctgctgcggccgctgctgcagcagctaatcctcatttacaaccgcctcagttccaccgtcaaatcgcagctgcgcattttggttcaccgactaatggtggattcagttcaccgacgagtaatggacagtttggatcaccgactagtaatggatttggatcaccgacgactaatgggaagtttgatccttcgttcttggcggtgaggcaaacgcagcagcaaccaattcagagaatgtctacaccatcattgcatagtccagttagtaattacgttgaggatttggaatctgcaaacgctaatggagggagaactgtcttaactttattcccaactcgagacgattaaaaagtcattatctttccggttactagatgttcaaaatgtctctgcagtcatcaagaacatgagtcagctgatcgttcttgtgcatcggttttatccggtggcgtttactctgtgcagtcttatcagtttaacattgatacaatccagcgtcaatgtgtggtcaagttctgtatctgaagctcaagcaccttcaggtcaaggcttgtattaacccttgtagctttcttgtgtaagattaatgtaaagatgagtttacttttgaacgtacatccgtacgaacaaactcaagattggaaaaaagaatgaaaaaaacaaaaacttacttcac

SEQ ID NO: 121 - DNA, 3856 bp, Arabidopsis thaliana
  source 1..3856: mol_type = genomic DNA
cgccggggactttgatatcatctgcgccgaacaaaaactctgcagaaaccctaattttcgtcagtgattgattcttccgtttccaccatggaagaagtatgcgaaggaaaagaattctcattccctcgtcaagaagaagatgtcctctccttctggactgaaatcgatgctttcaagacacagctcaaacgcactgagaatcttcctgagtacatcttctacgacggacctccttttgccaccggacttcctcactacggacatatcctcgctggtacgattaaagatattgtgactcggtatcagaccatgactggtcaccatgtcactcgtcggtttgggtgggattgtcatggcttacctgttgagaatgagattgatcggaaattgaatattaagaggagagatgaagttattaagatgggaattgataagtataatgaagagtgtaggagtattgtgactcgttatgttgctgagtgggagaaggttattactaggtgtggtcgttggattgattttaagaatgattataagactatggatttgccttttatggaaagtgtttggtgggttttttctcagctttgggagaagaatcttgtttacagaggattcaaggttatgccgtacagtactggttgtaagacacctttatctaattttgaagctggtcagaactataaggaagtccctgatcctgaaatcatggtgacttttccggttattggggatcaagataatgctgcttttgtggcatggactactactccgtggactcttccaagcaatcttgctttgtgtgtaaatgcgaagtttgtctatgtgaaggttcgtaacaagaacactggaaaagtgtacattgttgctgaatctcggttgtctgctcttcccactgataagcctaaggccaagttaagtaatggacctgctggtgatactaagaaagcaaatcctaaagctaaaggtgctaaacctgagagtgcagctgattcttatgaagttttggagaaatttaatggagcttccctggttgggaagaagtatgaacctttgtttgattactttagtgatttctcaagtgaggcctttcgagtagtagcagatgattatgtcactgatgacagtggtactggtattgtccactgtgctcctgcctttggtgaagatgattatcgtgtttgtcttttgaacaaaataatcaaaaagggggagaatctagttgttgctgttgatgatgatgggttgtttactgagagaattacccacttcagtggccgttatgtcaaagatgcagacaaggatataattgaagccgttaaggccaagggcaggcttgttaaaacgggaagctttactcactcatacccattttgctggcgatcagacaccccactcatatatagagcagttccaagttggtttgtgcgtgtggagcagttgaaagaaaagttgttaaaaagcaatgaacagacagaatgggtacctggttatgtgaaggataaacgttttcacaattggctcgaaaatgcaagggattgggcaatcagccgaagtagattttggggcacgcctcttccgatatggataagtgatgatggggaggaagttgtgatcatggattccgtagagaagcttgaaaagctctctggtgttaaggtctttgacctgcatcgtcaccatattgatcatattacaattccatctagtcgtggcgatgagtttggtgtgctccgtcgtgtagaagatgtttttgattgttggtttgagagtgggtcaatgccttacgcgtatatccattatccgtttgaaaacaaggagttatttgagaagaactttcctggtgattttgtggctgaaggtcttgatcagactcgtggatggttttatactcttatggtgttgtctactgcattatttgaaaaaccagcgtttaaaaatctgatttgcaatggtcttgtacttgctgaggatgggaaaaagatggctaagaaattacggaattatccaccacctttggaagtcatagatgagtatggggctgatgctgtgcgattgtacctgataaattctccggttgtacgtgctgagccactacgcttcaaaaaagaaggagtactcggtgttgtcaaagatgtattccttccatggtacaatgcatatcggttcctcgttcagaatgcaaagagacttgagactgaaggtggtgtgccctttgttcctactgatctggcaactatacagtcagcaaacattcttgatcagtggattcactcagctacgcagagtcttgttcgttttgtccgcgaggagatggatgcctatcggctttacactgtggttcctcgtctcttgaagttcctcgacaatctcactaacatatatgtcagattcaaccgcaagagattaaaaggccgtacgggggaagatgattgtcacactgctctttcgactctattcaatgtgctccttacttcttgcaaagtgatggccccgtttacacctttcttcactgaaactttgtaccagaatctgcggaaagcgtgtaaaggttctgaggaaagtgttcactactgcagtattccaccaagggaaggaatggaaggggagaggattgagttaagtgttacgaggatgatgaaaatcattgatcttgctcggaacattcgtgagcgtaacaaactacccttgaaaactcctctaaaggaaatgattgtagtccatcccgatgctgatttcttaaatgacataactggagtactaagagagtatgtcttggaagaacttaacgtgagatcgcttgtaccatgcaatgatactctgaagtatgcatcactaaaagcagaaccagatttcagtgtattgggaaagcgacttggaaagtcgatggggcttgttgcaaaggaagttaaagaaatgtctcaaaaagatatcttagcatttgaggaggctggggaagttactattgctaaccacttgctaaaggaaacagatatcaagattgttagggttttcaaacgcccagacgatttgaaagagaatgagattgattcagctggagatggtgatgttttggtgattctggatctacgagcagatgattctttggttgaagcaggttttgcccgtgagattgtaaacaggatccagaaactaaggaaaaagtcaggtctggaaccaacagactttgtggaagtgtacttccaatcattggacgaggatgaatctgtttctaaacaagttctagtctctcaggaacaaaacatcaaggattcaattggctccactttacttttgtctagtttaatgccatcacatgcagtcataatagccgatgagacattcaccccaaaagaaacatccgatgagagtgtcaaaaaggttccaaagttgtcgtataagataagtttggctagaccggctttgaagttcaatgaagaggctgttcttgctttatactcaggagatgtgaaatctgcaaccgggcttcaaacatacttgttatcaagggatcattcgaatttgaagtcagagttccaagccggagatgggaagataactgtaagctgcattgaaaatgtgcctgttgcgactgtggttcttggcgaacatctccatttgagtgtcggcgatgacttattgagcaagaggaacgcatgagccgtccctccggttttgtttgatttattgtggtaacttgggatttatttcccttatttttcttcttccatatcttacctataaactacttatttagattgttgcaaaaagttaaatctcagtgttgagactctcttttactcgttctatttgtacaatactaaacttttattcatctcaaaatttatggttggac

SEQ ID NO: 122 - DNA, 2933 bp, Arabidopsis thaliana
  source 1..2933: mol_type = genomic DNA
atcttctttctatagtttccatgaagtcttcttcttctcagagctacgatgttttccccaacttcagaggggaagatgtccgccactcattagtcagccaccttcgtaaggaacttgatcgcaaattcatcaatacattcaacgacaacaggatcgaaagaagccgcaaaataaccccagagctgttattggctatagaaaactcaaggatctcacttgtcgtcttctctaaaaactatgcttcttccacgtggtgcttagatgaattggtgaagatccaagagtgctatgagaaattggatcaaatggtgattcctattttctacaaagtagatccttctcatgttagaaaacagaccggagagtttggcatggtctttggggagacctgcaagggcagaacagagaatgagaagcgaaaatggatgcgagctctagcagaggtagcacatctagccggagaagatcttcggaactgataagtttcaggtgggtaaacttccgataagtgattgtcggaacagtgtgtatgaggattaaacacagagaaagatcgtgtggtgattgtagtgtcggtaaacaagtttttaaagcctcccagctgtaatgtatcaaccgtcggaaaggggtgggtcccacgagcctgagtaaagacgcgtagcgaagcagaaatgcttgaaaatatcgccaaggatgtttcaaacaaactcttccccccatcaaataatttcagtgacttcgtcgggattgaagctcatatagaggcattgatatcaatgttgcgcttcgactccaagaaagcgcgaatgatagggatttgtgggccttctgaaactggtaagactactataggaagagctttatacagcagactcaaaagcgacttccaccatcgggctttcgtagcatataagagaaaaatacggagcgactatgaccagaagctgtattgggaagaacaatttctatcagaaattctttgtcagaaggatataaagatagaggaatgtggtgcggtggaacaacgactaaagcacacgaaagttcttattgttcttgatgatgttgatgatatagagctactaaaaacgttggtaggacgtatcagatggtttggatctgagagcaaaattgttgtgattactcaaaaaagggaacttctcaaggctcacaacattgcacatgtttatgaagtgggattcccatcagaagaactggctcatcaaatgttttgtcgatatgcttttgggaaaaactctccacctcatggtttcaacgagcttgcagatgaagctgcaaagattgccggtaatcgtcctaaagctctcaagtacgttggttcgtcttttagaagactagacaaggaacaatgggtgaagatgctatcggagttccgtagtaatgggaataaactaaaaatcagctatgatgagttagatggtaaaggtcaagattacgttgcgtgtttaaccaatggttcaaattcccaggtgaaggcagagtggatccacttggcactaggcgtgtctatattacttaacatccgcagtgacggaacgacaattctcaaacatttgagctacaatcgaagcatggcgcaacaagcaaaaatatggtggtatgaaaatttggaaagagtgtgcaagaagtacaatatatgtggcatagatagctcaactgatggtggtggttcaacgtatggacaatgttcaaattcccaatttcaaagaaacatggacgcaagccccgggggaaacaaaaccagtaatcaatccacaaaagattcaccgagagcttctcaagtagagaaggaaaagatcgagtactgtgagccacatgtatatataacacctgccatcttcagtgacggaaccagagctcccaaatacgtggagtctagtagccgaagagtaacccaagtgcaccacgccaaaacatggtggccggagaattgtgaaaaagtgtacgagaaccacaacaacatatatggcatagatagatcaattgacggtggtgataagtttgagggaaaaagtaaagttagtgacggtgggttagacggcaaagatcaaggttcaatgtatggacaaagttcaaattccgagcttcaaataaacatggacgcagacaataggagatgtgaacctgtgagtgagatgcttttcaaaaattacaatgtgtgttcgcctaatgcacatatgcctgcaggtttaaccgatgtaaactgttcaaatccccagtctcaaagaaaattggacgcaagcctaaagaaagacaaaattgtgcatgagtggattcgaaccggtagtggcttcttttttgattttcagggcccaaaatctatagtgagtgctgctcaagtggacgagaaaaatttcgagtactgtgaacaaggtgtgtatataacacttggcatcctcagtggcggaattatagttctcaaacatttggagttcagccgaagaatggcgcaacaagcaaaagtttggtggtcggaaaattggataaaagtgtaccaggagcacaacatatgtggcatagataaatcatttgatggtaggtttgatgatagacgtgtcattcgtcaattaagaccaaactgaagcacggcctggcccttgtaaaagtcaggacttgagctagatacttaagccaagcagatctgtttggctaagtctggtcgggttagcgcgaaattgtcgaaatctgtttaataattgcattcagtgcaagtctttaatttgtacttcatggctttaatacactaattaaacattggatcatttttagttttttcttcttttcaaaatacatatttttctaagttttccaatttagtgattttattagttctttagtagaatactggatcatggacacatgctacaacatgctttgacctaattatgaaatttatcagcgaatatattatg

SEQ ID NO: 123 - DNA, 960 bp, Arabidopsis thaliana
  source 1..960: mol_type = genomic DNA
tcgtcgccgttaaaatctgcgatctcattgctcattggtgaagacaaatccctaattcgtatgtcagattctgtggccggcgatttccctcccgatccacttctcgcctccggagccttcatctcctccgccggtgacggaaccctagacagtagtgcgaaacgacgaccgattcagggaggaatcggaatttctggttcgggagagagcgtacgcatcgggatggctaacggcactgatcaggtgaatcatcagacggaatcgaagtcgcggaagcgtgcggcgcctggagataattggttgcctcctggttggagagttgaagataagattcgaacttccggtgccacagctggttcggtggataagtactattacgaaccaaatacaggacgtaagtttcggtccaggactgaggtgctgtactacttggaacatggaacttctaaaagaggcaccaagaaagctgagaatacatatttcaatccagaccattttgaaggccaaggaagcaatagagtcaccagaaccgctacagtgcctccacctccgccaccgccattggactttgattttaagaatccaccagacaaggtaagctggtctatggcaaacgcaggagaagaaggttggatacctaatattggggacgtcaaggttcaagactcagtgagacgagattggagcactgcgtttacctttatcacaagccgaaaccctagtaaagtgtcggcttgaagactatgatgacctggtggcgatttttgggttgttgcatctatggtaagatacacagatatgttagggttacttaattggataattcttgtttagtcttcattcatcaatcatcaagttatgtgtactataatttttgtagcggtttttggaagaatatgataaggggatatgcatctttgtgtttgcttttggaacgtgataaccattcgacttttgact

SEQ ID NO: 124 - DNA, 464 bp, Cardiovirus A
  source 1..464: mol_type = other DNA
gagggcccggaaacctggccctgtcttcttgacgagcattcctaggggtctttcccctctcgccaaaggaatgcaaggtctgttgaatgtcgtgaaggaagcagttcctctggaagcttcttgaagacaaacaacgtctgtagcgaccctttgcaggcagcggaaccccccacctggcgacaggtgcctctgcggccaaaagccacgtgtataagatacacctgcaaaggcggcacaaccccagtgccacgttgtgagttggatagttgtggaaagagtcaaatggctctcctcaagcgtattcaacaaggggctgaaggatgcccagaaggtaccccattgtatgggatctgatctggggcctcggtgcacatgctttacatgtgtttagtcgaggttaaaaaaacgtctaggccccccgaaccacggggacgtggttttcctttgaaaaacacgatgataat

SEQ ID NO: 125 - DNA, 228 bp, Tobacco mosaic virus
  source 1..228: mol_type = other DNA
atctaagttaggttgtaaacatattagagacgttgttcatttggaagagttacgcgagtctttgtgtgatgtagctagtaacctaaataattgtgcgtatttttcacagttagatgaggccgttgccgaggttcataagaccgcggtaggcggttcgtttgctttttgtagtataattaaatatttgtcagataagagattgtttagagatttgttctttgtttgata

SEQ ID NO: 126 - DNA, 101 bp, Hibiscus chlorotic ringspot virus
  source 1..101: mol_type = other DNA
tagcttgtttgggttctttatcactgtcctgattaaggctgaatcagaacactttcacttccacacacacgacagtagtaagacacaaaatatagtagtta

SEQ ID NO: 127 - DNA, 147 bp, Zea mays
  source 1..147: mol_type = other DNA
agcacaacatttcaaccagaaacactagccgaagcaaatccattccacaagcacctggtgggatcatctcatcatcagaaaccaagagagagattccgtgtccgcttgttgtagtagattgtgaggactgaggaccgagaagcagcc

SEQ ID NO: 128 - DNA, 196 bp, Plautia stali intestine virus
  source 1..196: mol_type = other DNA
aagctgactatgtgatcttattaaaattaggttaaatttcgaggttaaaaatagttttaatattgctatagtcttagaggtcttgtatatttatacttaccacacaagatggaccggagcagccctccaatatctagtgtaccctcgtgctcgctcaaacattaagtggtgttgtgcgaaaagaatctcacttcaa

SEQ ID NO: 129 - DNA, 174 bp, Kashmir bee virus
  source 1..174: mol_type = other DNA
aatttaaatatgttaataatgctgaagacaagtatttcgattattaacctctatatttctatataaagtatctgtgagtctcagtggacatcacagtaaggtcgcagttaacttgtaatcttttcattcctgtgtcggagcagtggtaatggagccggacgatttcgccaaaac

SEQ ID NO: 130 - DNA, 204 bp, Solenopsis invicta virus 1
  source 1..204: mol_type = other DNA
aacgtttctcttctggttaccagcaacataggaaattgtcgttgaactacatgttgtaaggctttagagaaataagggagtgtcctatttaggatgaggtgctccggtggcagccccaccaaaacctctagcgactaggaacagctatatcgggttgctatagcagtcaggatgtcattctggcgttccgaaatacccaaacct

SEQ ID NO: 131 - DNA, 178 bp, Triatoma virus
  source 1..178: mol_type = other DNA
tgatcttgctttcgtaataaaattctgtacataaaagtcgaaagtattgctatagttaaggttgcgcttgcctatttaggcatacttctcaggatggcgcgttgcagtccaacaagatccagggactgtacagaattttcctatacctcgagtcgggtttggaatctaaggttgactc

SEQ ID NO: 132 - DNA, 211 bp, Cricket paralysis virus
  source 1..211: mol_type = other DNA
taaaaagcaaaaatgtgatcttgcttgtaaatacaattttgagaggttaataaattacaagtagtgctatttttgtatttaggttagctatttagctttacgttccaggatgcctagtggcagccccacaatatccaggaagccctctctgcggtttttcagattaggtagtcgaaaaacctaagaaatttacctgctacatttcaagata

SEQ ID NO: 133 - DNA, 353 bp, Cricket paralysis virus
  source 1..353: mol_type = other DNA
ttcgataccaagagctggtgtctgagggattacgactcgcgtggtcggacagcacatgttagtcatgtattatggtgtttcccaacacgtatctttgctctagtattgaactttagtgatgagtgtacttggcatgtacacctgattagttagcccttgtggatacgccactgccgctcaggtacagtaggacataccccaaatattgggttccactcgtagagaagaaaattagtggcgaaacgtacggtttatgtcaaaggagaaggtgattttaattgcacctgaagcaaccctaggtcttccctttgatgtgagctaataaggagtaaccgattcttacaatgtgatca

SEQ ID NO: 134 - DNA, 232 bp, Hepacivirus C
  source 1..232: mol_type = other DNA
gcctccaggaccccccctcccgggagagccatagtggtctgcggaaccggtgagtacaccggaattgccaggacgaccgggtcctttcttggataaacccgctcaatgcctggagatttgggcgtgcccccgcaagactgctagccgagtagtgttgggtcgcgaaaggccttgtggtactgcctgatagggtgcttgcgagtgccccgggaggtctcgtagaccgtgcacc

SEQ ID NO: 135 - DNA, 116 bp, Turnip crinkle virus
  source 1..116: mol_type = other DNA
ctctctctcactggtcctcctactttgtcatctgattcctgaaatcaaaccgattcacacatcctacaacacacacgactcatcgaagcagcaacacataagcatcaacactggaa

SEQ ID NO: 136 - DNA, 148 bp, Turnip vein-clearing virus
  source 1..148: mol_type = other DNA
gaattcgtcgattcggttgcagcatttaaagcggttgacaactttaaaagaaggaaaaagaaggttgaagaaaagggtgtagtaagtaagtataagtacagaccggagaagtacgccggtcctgattcgtttaatttgaaagaagaaa

SEQ ID NO: 137 - DNA, 579 bp, Rhopalosiphum padi virus
  source 1..579: mol_type = other DNA
gataaaagaacctataatcccttcgcacaccgcgtcacaccgcgctatatgctgctcattaggaattacggctccttttttgtggatacaatctcttgtatacgatatacttattgttaatttcattgacctttacgcaatcctgcgtaaatgctggtatagggtgtacttcggatttccgagcctatattggttttgaaaggacctttaagtccctactatactacattgtactagcgtaggccacgtaggcccgtaagatattataactattttattatattttattcaccccccacattaatcccagttaaagctttataactataagtaagccgtgccgaaacgttaatcggtcgctagttgcgtaacaactgttagtttaattttccaaaatttatttttcacaatttttagttaagattttagcttgccttaagcagtctttatatcttctgtatattattttaaagtttataggagcaaagttcgctttactcgcaatagctattttatttattttaggaatattatcacctcgtaattatttaattataacattagctttatctatttata

SEQ ID NO: 138 - DNA, 367 bp, Homo sapiens
  source 1..367: mol_type = other DNA
aattccagcgagaggcagagggagcgagcgggcggccggctagggtggaagagccgggcgagcagagctgcgctgcgggcgtcctgggaagggagatccggagcgaatagggggcttcgcctctggcccagccctcccgctgatcccccagccagcggtccgcaacccttgccgcatccacgaaactttgcccatagcagcgggcgggcactttgcactggaacttacaacacccgagcaaggacgcgactctcccgacgcggggaggctattctgcccatttggggacacttccccgccgctgccaggacccgcttctctgaaaggctctccttgcagctgcttagacgctggatttttttcgggt

SEQ ID NO: 139 - DNA, 222 bp, Israeli acute paralysis virus
  source 1..222: mol_type = other DNA
gtatagtgttctggaggcatcattctatggttacccatcattagaggaaatttccaataaactctggtgtaaggcttagagtgatggtcgaggtgccctatttagggtgaggagcctcggtggcagccccaccaaatcctctattggataggaacagctgtactgggcagttacagcagtcgtatggtaacacatgcggcgttccgaaataccatgcctggc

SEQ ID NO: 140 - DNA, 174 bp, Drosophila C virus
  source 1..174: mol_type = other DNA
aatgattttgaaacatattaagatgtttatacgagcgtgttgtttactattttcaggatatgtggaagcggttgtgtatgatctatacgcacatttagttcccagagggcgttgtcgtctccccctaagcaagggagaaacacgtggcacatgatcttgcgcttaacgataaaa

SEQ ID NO: 141 - DNA, 190 bp, Black queen cell virus
  source 1..190: mol_type = other DNA
ccaacaatgtgatcttgcttgcggaggcaaaatttgcacagtataaaatctgcaagtagtgctattgttggaatcaccgtacctatttaggtttacgctccaagatcggtggatagcagccctatcaatatctaggagaactgtgctatgtttagaagattaggtagtctctaaacagaacaatttacct

SEQ ID NO: 142 - DNA, 174 bp, Homalodisca coagulata virus 1
  source 1..174: mol_type = other DNA
ttgcctctctcaacaaaaagccaccgacattaagagagagagtattgctgcttagttaactgcaggccctatttagggttaccgcccaggatctgcaacagcattcctgtatcatccagggcaccggtggacttggtgaggattgagttgacctcatcattagagaccagactc

SEQ ID NO: 143 - DNA, 184 bp, Aphid lethal paralysis virus
  source 1..184: mol_type = other DNA
aattactaatttgatctttaggttataatgttaggactataaaaattagcttaatgcatttagtaatttaaggcttagttatttaactttacttatcaagatggccgttggcagccccacgaaatctagattagtccgaatgtcctattttgattaggtggtcagataggtcagaaactcacct

SEQ ID NO: 144 - DNA, 174 bp, Himetobi P virus
  source 1..174: mol_type = other DNA
catccgtaatacaacccggaataacctccaaaccgagaagaactagtctatgaccagacgaaaaggaactagtccctgttcttttcttagggcctttttcacctgggtaaagtgtagttattgcgtataactctggtatcaataccacccggaagaaattatttatctgccatc

SEQ ID NO: 145 - DNA, 174 bp, Mud crab virus
  source 1..174: mol_type = other DNA
catttatttatattaaatactgacactttgcgggttaaaatgtttaatactatttttcaatttgaggttgtatgagataattttgatttctatgttatcattgaataagggagtctggccctaattgatgtacgactcttctttggttgcgacccgagtcccttctacatcaag

SEQ ID NO: 146 - DNA, 642 bp, Cadicivirus A
  source 1..642: mol_type = other DNA
aactctaagccgaacaattatagctaggctttttattatataacattaattaggcattagcgttgtcgccaatctcttggtaatcctaaggatacctttcctgttgactaagatgaagcgccttcggttaccgatgcccggtgtccacgaagccatcgtggtcggccgcgtcccccacctctcccaacttggactccatgttttcagtaggtgtaatgattagtattattgattctgctcgttcaatgtgtttatcttcacgatctgggacccaacacatgcttcactcatgtttaaatgttggttccctcattttgaagacacccaaaccatagagtgcgagaatgaggatttctacttccattctggtaacagaaatgaattcctgcgtgtgtctcgtaaatggaatctttaagaacttcagataaatcgaacaatacactaatacaagttgttttctaccaacatgttcaatgcggctaatctgaccgtggagctgtgaagcgctcaaacccgagtgttgtatacagtcgtaatgcgtaagtccatgaggaaccgactactgttacctctgttggtgtgtttctcctttattctcttttattattatttgttattgcaaatactacaactttgatcaac

SEQ ID NO: 147 - DNA, 130 bp, Arabidopsis thaliana
  source 1..130: mol_type = genomic DNA
gtaaggatttttatgatatagtatgcttatgtattttgtactgaaagcatatcctgcttcattgggatattactgaaagcatttaactacatgtaaactcacttgatgatcaataaacttgattttgcag

SEQ ID NO: 148 - DNA, 91 bp, Arabidopsis thaliana
  source 1..91: mol_type = genomic DNA
gtaacattccttagttacctttcttttctttttccatcataagtttatagattgtacatgctttgagatttttctttgcaaacaatctcag

SEQ ID NO: 149 - DNA, 108 bp, Arabidopsis thaliana
  source 1..108: mol_type = genomic DNA
gtgctcttgaaattggaactcttcttttgttgtctaaacctatcaatttctttgcggaaatttatttgaagctgtagagttaaaattgagtcttttaaacttttgtag

SEQ ID NO: 150 - DNA, 101 bp, Arabidopsis thaliana
  source 1..101: mol_type = genomic DNA
gtaagttgttacttatgattgttttcctctctgctacatgtattttgttgttcatttctgtaagatataagaattgagttttcctctgatgatattattag

SEQ ID NO: 151 - DNA, 121 bp, Arabidopsis thaliana
  source 1..121: mol_type = genomic DNA
gttagtatcatatgaagaaatacctagtttcagttgatgaatgctattttctgacctcagttgttctcttttgagaattatttcttttctaatttgcctgatttttctattaattcattag

SEQ ID NO: 152 - protein, 124 aa, Arabidopsis thaliana
GTAAATCCTGGTCCACACTTTTACGATAAAAACACAAGATTTTAAACTATGAACTGATCAATAATCATTCCTAAAAGACCACACTTTTGTTTTGTTTCTAAAGTAATTTTTACTGTTATAACAG

SEQ ID NO: 153 - protein, 136 aa, Arabidopsis thaliana
GTAAGAGGTCAAAAGGTTTCCGCAATGATCCCTCTTTTTTTGTTTCTCTAGTTTCAAGAATTTGGGTATATGACTAACTTCTGAGTGTTCCTTGATGCATATTTGTGATGAGACAAATGTTTGTTCTATGTTTTAG

SEQ ID NO: 154 - DNA, 150 bp, Arabidopsis thaliana
  source 1..150: mol_type = genomic DNA
gtaagttctgcatttggttatgctccttgcattttaggtgttcgtcgcacttccatttccatgaatagctaagattttttttctctgcattcattcttcttgcctcagttctaactgtttgtggtatttttgttttaattattgctacag

SEQ ID NO: 155 - DNA, 121 bp, Arabidopsis thaliana
  source 1..121: mol_type = genomic DNA
gtaaagcaactgtgttttaatcaatttcttgtcaggatatatggattataacttaatttttgagaaatctgtagtatttggcgtgaaatgagtttgctttttggtttctcccgtgttatag

SEQ ID NO: 156 - DNA, 136 bp, Arabidopsis thaliana
  source 1..136: mol_type = genomic DNA
gtaaagtttccaactttcctttaccatatcaaactaaagttcgaaactttttatttgatcaacttcaaggccacccgatctttctattcctgattaatttgtgatgaatccatattgacttttgatggttacgcag

SEQ ID NO: 157 - DNA, 121 bp, Arabidopsis thaliana
  source 1..121: mol_type = genomic DNA
gtctgtctttcctatttcatatgtttaatcctaggaatttgatcaattgattgtatgtatgtcgatcccaagactttcttgttcacttatatcttaactctctctttgctgtttcttgcag

SEQ ID NO: 158 - DNA, 159 bp, Arabidopsis thaliana
  source 1..159: mol_type = genomic DNA
gtaaaatattggatgccagacgatattctttcttttgatttgtaactttttcctgtcaaggtcgataaattttattttttttggtaaaaggtcgataatttttttttggagccattatgtaattttcctaattaactgaaccaaaattatacaaaccag

SEQ ID NO: 159 - DNA, 109 bp, Arabidopsis thaliana
  source 1..109: mol_type = genomic DNA
gtaaggacttctcatgaatattagtggcagattagtgttgttaaagtctttggttagataatcgatgcctcctaattgtccatgttttactggttttctacaattaaag

SEQ ID NO: 160 - DNA, 189 bp, Solanum tuberosum
  source 1..189: mol_type = genomic DNA
gtttgtttctgcttctacctttgatatatatataataattatcattaagtagtagtaatataatatttcaaatatttttttcaaaataaaagaatgtagtatatagcaattgcttttctgtagtttataagtgtgtatattttaatttataacttttctaatatatgaccaaaacatggtgatgtttag

SEQ ID NO: 161 - DNA, 94 bp, Cucumber mosaic virus
  source 1..94: mol_type = other DNA
gtttatttacaagagcgtacggttcaatccctgcctcccctgtaaaactaccctttgaaaacctctctttcttaatcttttctttgtaattcct

SEQ ID NO: 162 - DNA, 74 bp, Brome mosaic virus
  source 1..74: mol_type = other DNA
gtagaccacggaacgaggttcaatcccttgtcgaccacggttctgctacttgttctttgtttttcaccaacaaa

SEQ ID NO: 163 - DNA, 107 bp, Citrus tristeza virus
  source 1..107: mol_type = other DNA
aatttcacaaattcaacctgttcgcccagaaaatacgtctggcacaacagggatccggaataggtccagcctttaagctctaatattcccacaacaaaaattacact

SEQ ID NO: 164 - DNA, 107 bp, Beet yellows virus
  source 1..107: mol_type = other DNA
gtttttaaccatccttctactagacgtacactcgtacatcctctagtatttcctttatttatcttcccataagcccctgcctttaacgtttaactctcgctatcgac

SEQ ID NO: 165 - DNA, 206 bp, Cowpea mosaic virus
  source 1..206: mol_type = other DNA
tattaaaatcaatacaggttttgataaaagcgaacgtggagaaatccaaacctttctttctttcctcaatctcttcaattgcgaacgaaatccaagctttggttttgctgaaacaaatacacaacgtatactgaatttggcaaatttctctctctctctctgtcattttctttcttctgtcgggactttcttagtcttgacccaac

SEQ ID NO: 166 - DNA, 84 bp, Potato virus X
  source 1..84: mol_type = other DNA
gaaaactaaaccatacaccaccaacacaaccaaacccaccacgcccaattgttacacacccgcttggaaaagcaagtctaacaa

SEQ ID NO: 167 - DNA, 161 bp, Potato virus A
  source 1..161: mol_type = other DNA
aaaataaacaaactacaaaacacaatcaagaaatcaaacgaattagagcaatcaatcttctaaatcttcaagcagttcacaacattttaaacacaatcaaaacttgaacaagttcaatcaaacacccaaattcagtttaaatactcaaaacgcaagcatca

SEQ ID NO: 168 - DNA, 184 bp, Potato virus Y
  source 1..184: mol_type = other DNA
aattaaaacaactcaatacaacataagaaaaacaacgcaaaaacactcataaacgctcattctcactcaagcaacttgctaagtttcagtttaaatcatttccttgcaattctctagaacaatattggaaaccatttcaactcaacaagcaatttcatcacttccaaccaatttcagatcctca

SEQ ID NO: 169 - DNA, 167 bp, Pepper mottle virus
  source 1..167: mol_type = other DNA
aaattaaaacataacatacaacataaacgaaagcaatcaaattttcaagcatttttcttgagctctttgatttttcctgcataaattaagcactttgatcaacaacatagtctcgatttgaatatttcaattgtttccagttttctctaatagcactccatactaaa

SEQ ID NO: 170 - DNA, 190 bp, Bean yellow mosaic virus
  source 1..190: mol_type = other DNA
aaaaaatataaaaactaaacaagacaatacaagacataacgcattcagaccttcaaacattcgcaagctttaaacaactttgtgtgaatttcgagtataagatttctaaaattctaaaattaaagtaattagtctttctttaagtgtcaatcaaatttgagtttttcgttattactattgcaagcttata

SEQ ID NO: 171 - DNA, 91 bp, Barley stripe mosaic virus
  source 1..91: mol_type = other DNA
gtatgtaagttgcctttgggtgtaaaatttcttgcatgcacataatcgtaatcgattcttcttgatctctaaacaacactttcccgttagc

SEQ ID NO: 172 - DNA, 115 bp, Wheat stripe mosaic virus
  source 1..115: mol_type = other DNA
cgaaagttaacactgagtacacacgatcccttgataccagcagcatctgtgagcttgtttggttaggcaacgcgggtcgaggtttactctgattgtacactggaaattatcagca

SEQ ID NO: 173 - DNA, 79 bp, Rice yellow mottle virus
  source 1..79: mol_type = other DNA
acaattgaagctaggaaaggagcatattgcgaaagcatccctccttccgacgaacaattgtagccacactgcatcgtgt

SEQ ID NO: 174 - DNA, 139 bp, Maize dwarf mosaic virus
  source 1..139: mol_type = other DNA
aaaaacaacaagactcaacacaacacaaccaaacacgaccaaacacaaccaaattacacgttattggagcacattcagtttgcaggcaacggttcgtttgcaaggtgcatcgaaaagcctctctgaacacacgatcgca

SEQ ID NO: 175 - DNA, 138 bp, Zucchini yellow mosaic virus
  source 1..138: mol_type = other DNA
aaattaaaacaaatcacaaagactacagaaatcaacgaacaagcagacgatttctaaaccgtgtttacaaacaagcaatctataattcgcacagcatcaagaatttctgcaatcactttgtttattttagacacaaca

SEQ ID NO: 176 - DNA, 132 bp, Watermelon mosaic virus
  source 1..132: mol_type = other DNA
aaattaaaactactcataaagacatcaaacaaaacaaacgcaaacaaattctcaagttttcaagctatttcaagcaatttgcattttcgatatttataagtttacgattcatcaatatcaacaacaacacga

SEQ ID NO: 177 - DNA, 148 bp, Sugarcane mosaic virus
  source 1..148: mol_type = other DNA
aaaacaacaaaactcaatacaacacaacaaaacacatccaagcaaaccaacgacatttgcaatcaaacttcagcgcacggctcaaaagagaaggctctttgagaacgctctctgaacttccctccttcggcattcgacttccggcgag

SEQ ID NO: 178 - DNA, 68 bp, Tobacco mosaic virus
  source 1..68: mol_type = other DNA
gtatttttacaacaattaccaacaacaacaaacaacaaacaacattacaattactatttacaattaca

SEQ ID NO: 179 - DNA, 71 bp, Tomato mosaic virus
  source 1..71: mol_type = other DNA
gtatttttacaacaattaccaacaacaacaacaaacaacaacaacattacattttacattctacaactaca

SEQ ID NO: 180 - DNA, 67 bp, Turnip vein-clearing virus
  source 1..67: mol_type = other DNA
gtttagttttattgcaacaacaacaacaaattacaataacaacaaacaaaatacaaacaacaacaac

SEQ ID NO: 181 - DNA, 69 bp, Pepper mild mottle virus
  source 1..69: mol_type = other DNA
gtaaatttttcacaatttaacaacaacaacacaaacaacaaacaacattacaaacaaaatacaactaca

SEQ ID NO: 182 - DNA, 63 bp, Turnip crinkle virus
  source 1..63: mol_type = other DNA
ggtaatctgcaaatccctggcacccgcctaaaattgccctcatcaaccttctctctattcacg

SEQ ID NO: 183 - DNA, 165 bp, Tomato bushy stunt virus
  source 1..165: mol_type = other DNA
naaattctccaggatttctcgacctagttcgtttatctggtgacttgcgctaccgttgctttgcgtagagaatttctctccataattattatctttagttgtggggtttgaaggttgggtctacctttcggggggataaattgtaacttccaacaaacaagcgac

SEQ ID NO: 184 - DNA, 33 bp, Tomato spotted wilt orthotospovirus
  source 1..33: mol_type = other DNA
agagcaatcaggtaacaacgattttaagcaaac

SEQ ID NO: 185 - DNA, 32 bp, Watermelon bud necrosis orthotospovirus
  source 1..32: mol_type = other DNA
agagcaatcgtgcaacaataagaatatcagta

SEQ ID NO: 186 - DNA, 87 bp, Turnip yellow mosaic virus
  source 1..87: mol_type = other DNA
gtaatcaactaccaattccagctctcttttgacaactggtcttatacccacttccgtacacttgcaaccctcgtaagacaattgcaa

SEQ ID NO: 187 - DNA, 281 bp, Cucumber mosaic virus
  source 1..281: mol_type = other DNA
cggtctccctcttcgggcgggatctgagttggcggtaatctgcaaaccgtctgaagtcactaaacacattgtgtggtgaacgggttgtccatccagctaacggctaaaatggtcagtcgtggagaaatccacgccagtagacttacaagtctctgaggcacctttgaaaccatctcctaggtttcttcggaaggacttcggtccgtgtacttctagcacaacgtgctagtttcagggtacgggtgccccccactttcgtgggggtctctaaaaggagacca

SEQ ID NO: 188 - DNA, 274 bp, Brome mosaic virus
  source 1..274: mol_type = other DNA
tgcgcttgtctctgtgtgagacctctgctcgaggagagccctgttccaggtaggaacgttgtggtctaactcaagactagctgaatcggtgctataaccgatagtcgtggttgacacgcagacctcttacaagagtgtctaggcgcctttgagagttactctttgctctcttcggaagaacccttaggggttcgtgcatgggcttgcatagcaagtcttagaatgcgggtgtcgtacagtgttgaaaaacactgtaaatctctaaaagagacca

SEQ ID NO: 189 - DNA, 273 bp, Citrus tristeza virus
  source 1..273: mol_type = other DNA
ttgaagtggacggaataagttcctcgcggaactttgtgttgggttggtaaagacccttatgatggtgatatatcactagacaataaccggatgggtaaagtctttaaaatgatcgaggggaaaattaaccgtatcctctcgttggtctaagctcccacagagtggtagtggtctcaagtgaggcttaacgtatgcgtgaaccaaagaagttctccttagagtgtgtgttgtttacccaacgcactgtccctatggggggccaacataggtcca

SEQ ID NO: 190 - DNA, 182 bp, Beet yellows virus
  source 1..182: mol_type = other DNA
tagagaagtgacggaggcgacctacctaccgtgtaatttaagtcgtcacagagtgacaacggcaccaagtggtgcttagtgcgtatgtaaattacgaagtgcaaaaaatttttctttttatattaagaaaatttttgcacactcctagcgaagtcccgctaggaagaaaaaataaggggccc

SEQ ID NO: 191 - DNA, 72 bp, Potato virus X
  source 1..72: mol_type = other DNA
ctacgtctacataaccgacgcctaccccagtttcatagtattttctggtttgattgtatgaataatataaat

SEQ ID NO: 192 - DNA, 227 bp, Potato virus A
  source 1..227: mol_type = other DNA
taaccgaagtgccgtactattactaagtaagagttcctgttagtatccttgtcttattattagaatacgtttatctttcaacaagtatgatgttcgtgctctcacctcgcaacagtgagtttgagtgggaaataaatactagtattctatggccttacttgttatatagacccaccacatagtgagattttatctcggtgactggttttatgtttcaactgtcaggg

SEQ ID NO: 193 - DNA, 328 bp, Potato virus Y
  source 1..328: mol_type = other DNA
tgtagtgtctctccggacgatatataagtatttacatatgcagtaagtattttggcttttcctgtactacttttatcataattaataatcgtttgaatattactggcagataggggtggtatagcgattccgtcgttgttagtgaccttagctgtcggttctgtattattaagtcttagataaaaagtgccgggttgttgttgtgtgactgatctatcgattaggtgatgctgtgattctgtcatagcagtgactatgtctggatttagttacttgggtgatgctgtgattctgtcatagcagtgactgtaaacttcaatcaggagac

SEQ ID NO: 194 - DNA, 266 bp, Pepper mottle virus
  source 1..266: mol_type = other DNA
ctgatgtggtctctgggatgaaatattattatatgtagtatgcaatatatagtatggcttttctcgttccagtctttatattaatgagagtaacttaagtaagtaatttgtacttcaaggattaatcaaggtgactctctgacactctcagtgaggtgacttgtttagtctgagtttacttattgtgagtataaagaatctctcagaaaacgagagtgacttctagacacactctaggaggtgatcgtagttggcatgagagagac

SEQ ID NO: 195 - DNA, 171 bp, Bean yellow mosaic virus
  source 1..171: mol_type = other DNA
agtatccgtctttaaattctctataatttggcgttacattacttaatactatgtattagtgaggtttcacctccagcattttaaattcagtatgtgtatcattctctctactctgacagggtaagcagttagtgaggttgcctcgtgtgagcctgatctttgtagagcgag

SEQ ID NO: 196 - DNA, 257 bp, Barley stripe mosaic virus
  source 1..257: mol_type = other DNA
aaaaaaaaaaaaaaaaaaatgtttgatcagatcattcaaatctgatggtgcccatcaaccatatgatgggagtgtttgcaagtccactataatcgaacttgaaaacgatgcctgaattggaaaccatgaatcttaacggattctggagagaaaatttaggaattggtatgtaagctacaacttccggtagctgcgtcacactttaagagtgtgcatactgagccgaagctcagcttcggtcccccaagggaagacca

SEQ ID NO: 197 - DNA, 350 bp, Wheat stripe mosaic virus
  source 1..350: mol_type = other DNA
gcgttgtcactcgtccgaagacgttaaactacggtgtcgttcattcgacgtgagattctgagttatgggtattgctacaaacccacacgaggtggtcgtccgtgcctgacattaagttgttgggatagaccagggcaagtcgggactttggctagaagtttgtgggtaacttcactgttaaaccctctggttcaacgtcagaaccacctaggagataatactctgggtttagttggcgtctgttgtaattatttataattcagcattttaaaatttcaagaaggtctttgaccatatagttgtactgggtgtgagttgtaccagtgtgttgttaactatgtttgtgtata

SEQ ID NO: 198 - DNA, 246 bp, Rice yellow mottle virus
  source 1..246: mol_type = other DNA
atccacggattggctacgagatcgacttaccctgaaaaggatgttgagcgttcttgaacgcggcccaatcctacgagatgatactggtgactatcctacgtgaggagttgcactcacgcttcaacccaaagcgacccatgcactggacagtgcttacccagatggttttcggagctactgggcggacctttcaccaaaccgaattccccactctttccgagagaattctcgggatgggtgggggag

SEQ ID NO: 199 - DNA, 250 bp, Maize dwarf mosaic virus
  source 1..250: mol_type = other DNA
tacggggttcaacttttacgcagtaatttagtaatatataagtaagctattgtggtgaggttgtacctcgttagttttatatatatattatgctacgtacctactatgtctgcaagtgagtgaggttgcacctcgacacttatagtgggcactattactagcttcgaatcacgagacggacggtccattgagtggttctaccacgaggatgcagcgagtttcgtggtgagagacaaaaaaaaaaaaaaaa

SEQ ID NO: 200 - DNA, 213 bp, Zucchini yellow mosaic virus
  source 1..213: mol_type = other DNA
taaagggtaggtcacctacctaggttatcgattcgctgccgacgtaattctaatatttaccgctttttatgatatctttagatttcagtgtgggcctcccacctttaaagcgtaaagtttatgttagttgtccaggaatgccgtagtcctgtcggaagctttagtgtgagcctctcacggataagctcgagattagactccgtttgcaagcct

SEQ ID NO: 201 - DNA, 249 bp, Watermelon mosaic virus
  source 1..249: mol_type = other DNA
agactaggtaaactggtcacagttagcatttcgggtcgttataagttttctataatataatatgttgcactttttagtatagtgtgattttatcacctttgtactgtttatgttagtgtggtttaaccatcttagtgtgctttatattatagtttatgcataacagggagaaccattacaataccggagttgtttgtagtgtgattacatcacggttaatagccgaggtacggtaatgtttgttgtcct

SEQ ID NO: 202 - DNA, 235 bp, Sugarcane mosaic virus
  source 1..235: mol_type = other DNA
tctcctggaaaccctgtttgcagtatctatagtatgttatgtgtactagtattaaaagtgaggctttgtctcgtttctgcttttactatttacgtactataagtgtgaaccagtctgcaagatacagggttggacccagtgtcttctggtgtagcacatactagcgtcgagccatgtcacggacagcgctgaggatggctttgccatgtgtgctgcgagtctcatggtgagagac

SEQ ID NO: 203 - DNA, 204 bp, Tobacco mosaic virus
  source 1..204: mol_type = other DNA
ggtagtcaagatgcataataaataacggattgtgtccgtaatcacacgtggtgcgtacgataacgcatagtgtttttccctccacttaaatcgaagggttgtgtcttggatcgcgcgggtcaaatgtatatggttcatatacatccgcaggcacgtaataaagcgaggggttcgaatccccccgttacccccggtaggggccca

SEQ ID NO: 204 - DNA, 201 bp, Tomato mosaic virus
  source 1..201: mol_type = other DNA
atgcataggtgctgaaatataaattttgtgtttctaaaacacacgtggtacgtacgataacgtacagtgtttttccctccacttaaatcgaagggtagtgtcttggagcgcgcggagtaaacatatatggttcatatatgtccgtaggcacgtaaaaaagcgagggattcgaattcccccggaacccccggttggggccca

SEQ ID NO: 205 - DNA, 235 bp, Turnip vein-clearing virus
  source 1..235: mol_type = other DNA
gcgtagtgcgcacgatagcgcatagtgtttttctctccacttaaatcgaagagataaacttacggtgtaattccgtgagggtggcgtaaaccaaattacgcaatgttttgggttccattaaaatcgaaaccccttatttcctggatcacctgttaacgcacgtttgacgtgtattacagtgggaataagtaaaagtgagaggttcgaatcctccctaaccccgggtaggggccca

SEQ ID NO: 206 - DNA, 199 bp, Pepper mild mottle virus
  source 1..199: mol_type = other DNA
acatgatggcataaataagttgaacgaacattaaacgtccgtggcgagtacgataactcgtagtgtttttccctccacttaaatcgaagggttgtcgttgggatggaacgcaattaaatacatgtgtgacgtgtatttgcgaacgacgtaattatttttcaggggttcgaatcccccccgaaccgcgggtagcggccca

SEQ ID NO: 207 - DNA, 255 bp, Turnip crinkle virus
  source 1..255: mol_type = other DNA
tacggtaatagtgtagtcttctcatcttagtagttagctctctcttatattaagaaaagaaaacaaaaacccccaggtcgctttattttgacctgtgttagggaccaaaaacggtggcagcactgtctagctgcgggcattagactggaaaactagtgctctttgggtaaccactaaaatcccgaaagggtgggctgtggtgaccttccgaactaaaagatagcctccctcctcgcgcggggggggggcctgccc

SEQ ID NO: 208 - DNA, 370 bp, Tomato bushy stunt virus
  source 1..370: mol_type = other DNA
gacagactcttcagtctgagtttgtggagatgagtgtaaatctggcatagcatacaggttactcttgttgggttctggatgttaggatgacgagtcgactcgggctccgcactaggtttggtcgcctaggggatggagatatggaaagggtctcgtgtggtatcagtcggtcgaaagacgcgcttccaacatgggcctatggtcggataagtcttagcaataccagccagcatgaattggattcctgtttacgaaagttaggtgtcacttgtggaagcggacccagacacggttgatctcacccttcggggggctatagagatcgctggaagcactaccggacaaccggaacattgcagaaatgcagccc

SEQ ID NO: 209 - DNA, 241 bp, Tomato spotted wilt orthotospovirus
  source 1..241: mol_type = other DNA
attaatagtaatgctcaacaatgcatggataatggattagatagaacttagaatacaaatttattgttattttagaattaggttagatctgattagactaaagacgatttggtgaaccaaatctatagtgtatgtaaatgtggagtcccggtatagtttcactggagggaattcttatatatcttatttgtaaagtctggttatggagagattatatgttttagttgtacctgattgctct

SEQ ID NO: 210 - DNA, 215 bp, Watermelon bud necrosis orthotospovirus
  source 1..215: mol_type = other DNA
ataagccatagaatagacagtatagaaccagaagcagtaaaagagcatgacaacaaaagggttttttcttttgcaaaaggatgaaagtattctaaatcagtttaaaatgcaatgtagttgtagtatctagaatcaacagtagagtcagaaatagtatttcttaataaaattgagactgagtgtagaatacttttgttttgttgctcgattgctct

SEQ ID NO: 211 - DNA, 105 bp, Turnip yellow mosaic virus
  source 1..105: mol_type = other DNA
gttctcgatctttaaaatcgttagctcgccagttagcgaggtctgtccccacacgacagataatcgggtgcaactcccgcccctcttccgagggtcatcggaacc

SEQ ID NO: 212 - DNA, 4851 bp, Tobacco mosaic virus
  source 1..4851: mol_type = other DNA
atggcatacacacagacagctaccacatcagctttgctggacactgtccgaggaaacaactccttggtcaatgatctagcaaagcgtcgtctttacgacacagcggttgaagagtttaacgctcgtgaccgcaggcccaaggtgaacttttcaaaagtaataagcgaggagcagacgcttattgctacccgggcgtatccagaattccaaattacattttataacacgcaaaatgccgtgcattcgcttgcaggtggattgcgatctttagaactggaatatctgatgatgcaaattccctacggatcattgacttatgacataggcgggaattttgcatcgcatctgttcaagggacgagcatatgtacactgctgcatgcccaacctggacgttcgagacatcatgcggcacgaaggccagaaagacagtattgaactatacctttctaggctagagagaggggggaaaacagtccccaacttccaaaaggaagcatttgacagatacgcagaaattcctgaagacgctgtctgtcacaatactttccagacaatgcgacatcagccgatgcagcaatcaggcagagtgtatgccattgcgctacacagcatatatgacataccagccgatgagttcggggcggcactcttgaggaaaaatgtccatacgtgctatgccgctttccacttctctgagaacctgcttcttgaagattcatacgtcaatttggacgaaatcaacgcgtgtttttcgcgcgatggagacaagttgaccttttcttttgcatcagagagtactcttaattattgtcatagttattctaatattcttaagtatgtgtgcaaaacttacttcccggcctctaatagagaggtttacatgaaggagtttttagtcaccagagttaatacctggttttgtaagttttctagaatagatacttttcttttgtacaaaggtgtggcccataaaagtgtagatagtgagcagttttatactgcaatggaagacgcatggcattacaaaaagactcttgcaatgtgcaacagcgagagaatcctccttgaggattcatcatcagtcaattactggtttcccaaaatgagggatatggtcatcgtaccattattcgacatttctttggagactagtaagaggacgcgcaaggaagtcttagtgtccaaggatttcgtgtttacagtgcttaaccacattcgaacataccaggcgaaagctcttacatacgcaaatgttttgtcctttgtcgaatcgattcgatcgagggtaatcattaacggtgtgacagcgaggtccgaatgggatgtggacaaatctttgttacaatccttgtccatgacgttttacctgcatactaagcttgccgttctaaaggatgacttactgattagcaagtttagtctcggttcgaaaacggtgtgccagcatgtgtgggatgagatttcgctggcgtttgggaacgcatttccctccgtgaaagagaggctcttgaacaggaaacttatcagagtggcaggcgacgcattagagatcagggtgcctgatctatatgtgaccttccacgacagattagtgactgagtacaaggcctctgtggacatgcctgcgcttgacattaggaagaagatggaagaaacggaagtgatgtacaatgcactttcagagttatcggtgttaagggagtctgacaaattcgatgttgatgttttttcccagatgtgccaatctttggaagttgacccaatgacggcagcgaaggttatagtcgcggtcatgagcaatgagagcggtctgactctcacatttgaacgacctactgaggcgaatgttgcgctagctttacaggatcaagagaaggcttcagaaggtgctttggtagttacctcaagagaagttgaagaaccgtccatgaagggttcgatggccagaggagagttacaattagctggtcttgctggagatcatccggagtcgtcctattctaagaacgaggagatagagtctttagagcagtttcatatggcaacggcagattcgttaattcgtaagcagatgagctcgattgtgtacacgggtccgattaaagttcagcaaatgaaaaactttatcgatagcctggtagcatcactatctgctgcggtgtcgaatctcgtcaagatcctcaaagatacagctgctattgaccttgaaacccgtcaaaagtttggagtcttggatgttgcatctaggaagtggttaatcaaaccaacggccaagagtcatgcatggggtgttgttgaaacccacgcgaggaagtatcatgtggcgcttttggaatatgatgagcagggtgtggtgacatgcgatgattggagaagagtagctgtcagctctgagtctgttgtttattccgacatggcgaaactcagaactctgcgcagactgcttcgaaacggagaaccgcatgtcagtagcgcaaaggttgttcttgtggacggagttccgggctgtgggaaaaccaaagaaattctttccagggttaattttgatgaagatctaattttagtacctgggaagcaagccgcggaaatgatcagaagacgtgcgaattcctcagggattattgtggccacgaaggacaacgttaaaaccgttgattctttcatgatgaattttgggaaaagcacacgctgtcagttcaagaggttattcattgatgaagggttgatgttgcatactggttgtgttaattttcttgtggcgatgtcattgtgcgaaattgcatatgtttacggagacacacagcagattccatacatcaatagagtttcaggattcccgtaccccgcccattttgccaaattggaagttgacgaggtggagacacgcagaactactctccgttgtccagccgatgtcacacattatctgaacaggagatatgagggctttgtcatgagcacttcttcggttaaaaagtctgtttcgcaggagatggtcggcggagccgccgtgatcaatccgatctcaaaacccttgcatggcaagatcctgacttttacccaatcggataaagaagctctgctttcaagagggtattcagatgttcacactgtgcatgaagtgcaaggcgagacatactctgatgtttcactagttaggttaacccctacaccagtctccatcattgcaggagacagcccacatgttttggtcgcattgtcaaggcacacctgttcgctcaagtactacactgttgttatggatcctttagttagtatcattagagatctagagaaacttagctcgtacttgttagatatgtataaggtcgatgcaggaacacaatagcaattacagattgactcggtgttcaaaggttccaatctttttgttgcagcgccaaagactggtgatatttctgatatgcagttttactatgataagtgtctcccaggcaacagcaccatgatgaataattttgatgctgttaccatgaggttgactgacatttcattgaatgtcaaagattgcatattggatatgtctaagtctgttgctgcgcctaaggatcaaatcaaaccactaatacctatggtacgaacggcggcagaaatgccacgccagactggactattggaaaatttagtggcgatgattaaaaggaactttaacgcacccgagttgtctggcatcattgatattgaaaatactgcatctttagttgtagataagttttttgatagttatttgcttaaagaaaaaagaaaaccaaataaaaatgtttctttgttcagtagagagtctctcaatagatggttagaaaagcaggaacaggtaacaataggccagctcgcagattttgattttgtagatttgccagcagttgatcagtacagacacatgattaaagcacaacccaagcaaaaattggacacttcaatccaaacggagtacccggctttgcagacgattgtgtaccattcaaaaaagatcaatgcaatatttggcccgttgtttagtgagcttactaggcaattactggacagtgttgattcgagcagatttttgtttttcacaagaaagacaccagcgcagattgaggatttcttcggagatctcgacagtcatgtgccgatggatgtcttggagctggatatatcaaaatacgacaaatctcagaatgaattccactgtgcagtagaatacgagatctggcgaagattgggttttgaagacttcttgggagaagtttggaaacaagggcatagaaagaccaccctcaaggattataccgcaggtataaaaacttgcatctggtatcaaagaaagagcggggacgtcacgacgttcattggaaacactgtgatcattgctgcatgtttggcctcgatgcttccgatggagaaaataatcaaaggagccttttgcggtgacgatagtctgctgtactttccaaagggttgtgagtttccggatgtgcaacactccgcgaatcttatgtggaattttgaagcaaaactgtttaaaaaacagtatggatacttttgcggaagatatgtaatacatcacgacagaggatgcattgtgtattacgatcccctaaagttgatctcgaaacttggtgctaaacacatcaaggattgggaacacttggaggagttcagaaggtctctttgtgatgttgctgtttcgttgaacaattgtgcgtattacacacagttggacgacgctgtatgggaggttcataagaccgcccctccaggttcgtttgtttataaaagtctggtgaagtatttgtctgataaagttctttttagaagtttgtttatagatggctctagttgttaa

SEQ ID NO: 213 - DNA, 4851 bp, Tomato mosaic virus
  source 1..4851: mol_type = other DNA
atggcatacacacaaacagccacatcgtccgctttgcttgagaccgtccgaggtaacaataccttggtcaacgatcttgcaaagcggcgtctatatgacacagcggtagatgaatttaatgctagggaccgcaggcctaaagtcaatttttccaaagtagtaagcgaagaacagacgcttattgcaaccaaagcctacccagaattccaaattacattctacaacacgcagaatgctgtgcattcccttgcaggcggtctccgatcattagaattggaatatctgatgatgcaaattccctacggatcattgacatatgatatcggaggtaattttgcatctcatctgttcaaagggcgagcatacgttcactgctgtatgccgaatctagatgtccgcgacataatgcggcacgagggccaaaaggacagtattgaactatacctttctaggctcgagaggggcaacaaacatgtcccaaacttccaaaaggaagctttcgacagatacgctgaaatgccaaacgaagtagtctgtcacgatactttccaaacgtgtaggcattctcaagaatgttacacgggaagagtgtatgctattgctttgcatagtatatacgatatacctgccgacgagttcggcgcggcactgctgagaaagaatgtacatgtatgttatgccgctttccacttttccgagaatttacttctcgaagattcacacgtcaacctcgatgagatcaatgcatgtttccaaagagatggagacaggttgactttttcctttgcatctgagagtactcttaattatagtcatagttattctaatattcttaagtatgtttgcaaaacttacttcccagcctctaatagagaggtttacatgaaggagtttttagtaactagagttaatacctggttttgtaaattttctagaatagatactttcttattgtacaaaggtgtagcgcataagggtgtagatagtgagcagttttacaaggctatggaagacgcatggcactacaaaaagactcttgcgatgtgcaacagtgaaagaatcttgttagaggattcttcatcagttaattactggtttccaaaaatgagggatatggtgatagttccactatttgacatatctctcgagactagtaaaagaacacgcaaagaggtcttagtttcaaaggactttgtttatacagtgttaaatcacattcgtacgtaccaggccaaagcgcttacttactccaacgtgttatctttcgtcgaatcaattcgttcgagagtgatcattaacggggttactgccaggtctgagtgggatgtcgataaatcattattacagtccttgtcgatgacgttcttcctacataccaagcttgccgttctgaaagacgatcttttgattagcaagtttgcacttggaccaaaaactgtctcacaacatgtgtgggatgagatttccctagctttcggcaatgctttcccatcgatcaaggaaagattgataaaccggaaactgatcaaaattacggagaatgcgttagagatcagggtgcccgatctttatgtcactttccatgataggttagtttctgagtacaaaatgtcagtggacatgccggtgctagacattaggaaaaagatggaagaaactgaggaaatgtacaatgcactgtccgaactgtctgtacttaaaaattcagacaagttcgatgttgatgttttttcccagatgtgccaatctttagaagttgatccaatgactgcagcaaaggtaatagtagcagttatgagcaacgagagtggtcttactctcacgtttgaacagcccaccgaagctaatgttgcgctagcattgcaagattctgaaaaggcttctgatggggcgttggtagttacctcaagagatgttgaggaaccgtccataaagggttcgatggcccgtggtgagttacaattggccggattatctggcgacgttcctgaatcttcatacactaggagcgaggagattgagtctctcgagcagtttcatatggcaacagctagttcgttaattcataagcagatgtgttcgatcgtgtacacgggccctcttaaagttcaacaaatgaaaaactttatagacagcctggtagcctcgctctctgctgcggtgtcgaatctagtgaagatcctaaaagatacagccgcgattgaccttgaaactcgtcaaaagttcggagttctggatgttgcttcgaaaaggtggctagttaaaccatccgcaaagaaccatgcatggggggttgttgagactcatgcgaggaaatatcacgtcgcattactggagcacgatgaatttggcattattacgtgcgataactggcgacgggtggctgtgagttctgagtcggtagtatattctgatatggctaaactcaggactctgagaagattgctcaaagatggagaaccacacgttagttcagcaaaggtggttttggtggatggcgttccagggtgcgggaagacaaaggaaattctttcgagagttaatttcgaagaagatctaattcttgtccctggtcgtcaagctgccgagatgatcagaagaagagctaatgcgtcgggcataatagtggctacaaaggataatgtgcgcaccgtcgattcatttttgatgaattacgggaaaggggcacgctgtcagttcaaaagattgttcatagacgaaggtttgatgctgcatactggttgtgtgaatttcttggttgaaatgtctctgtgcgatattgcatatgtttatggagacacccaacaaattccgtacatcaacagagtaactggtttcccgtaccctgcgcactttgcaaaattggaggtcgacgaagtcgaaacaagaagaactactcttcgctgtccggctgatgtcacacacttcctaaatcaaaggtatgaaggacacgtaatgtgcacgtcttctgaaaagaaatcagtttcccaggaaatggttagtggggctgcgtctatcaatcctgtgtccaagccgcttaaagggaaaattttgactttcacacagtctgacaaggaggcccttctctcaaggggctacgcagatgtccatactgtacatgaggtacaaggtgagacttatgcagacgtatcgttagttcgactaacacctacgcctgtatctatcatcgcaagagacagtccgcatgttctggtctcgttgtcaagacacacaaaatccctaaagtactacaccgttgtgatggatcctttagttagtatcattagagatttagaacgggttagtagttacttattagacatgtacaaagtagatgcaggtactcaatagcaattacaggtcgactctgtgtttaaaaatttcaatctttttgtagcagctccaaagactggagatatatctgatatgcaattttactatgataagtgtcttcctgggaacagcacgttgttgaacaactacgacgctgttaccatgaaattgactgacatttctctgaatgtcaaagattgcatattagatatgtctaagtctgtagctgctccgaaagatgtcaaaccaactttaataccgatggtacgaacggcggcagaaatgcctcgccagactggactgttggaaaatctagttgcgatgattaaaagaaattttaattcaccagagttgtccggagtagttgatattgaaaatactgcatctttagtggtagataagttttttgatagttatttacttaaggaaaaaagaaaaccaaacaaaaatttttcactgtttagtagagagtctctcaataggtggatagcaaagcaagaacaagtcacaattggtcagttggccgattttgattttgtggatcttccagccgttgatcagtacaggcatatgattaaagcgcaaccgaagcagaaactggatctgtcaattcagacagaatatccagcgttgcaaacgattgtgtatcattcaaagaaaatcaacgcaatatttggtcctcttttcagtgagcttacaaggcaattacttgacagtattgactcaagcagattcttgttctttacgagaaagacaccggctcagatcgaagatttcttcggagatctagacagtcatgtcccaatggacgtacttgagttggatgtttcgaagtatgataagtctcaaaacgagtttcattgtgctgttgagtacgaaatctggaggagactgggtctggaggatttcttggcagaagtgtggaaacaagggcatagaaaaaccaccctgaaagattacactgctggtataaaaacgtgtttatggtaccagagaaagagtggtgatgttacaacttttatcggtaataccgtcatcattgcttcgtgtcttgcatcaatgctcccgatggaaaaattgataaaaggagccttctgcggagatgacagtttgttgtactttcctaagggttgtgagtatcccgatatacaacaagctgccaatctaatgtggaattttgaggccaaactgttcaagaagcaatatgggtacttctgcgggaggtacgtgattcatcacgatagaggttgcatagtatactacgaccctttgaagctgatttcgaaacttggtgctaaacacatcaaggattgggatcatttggaggagttcagaagatccctctgtgatgttgctgagtcgttgaacaattgcgcgtattacacacaattggacgacgctgttggggaggttcataaaaccgccccacctggttcgtttgtttataagagtttagttaagtatttgtcagataaagttttgtttagaagtttatttcttgatggctctagttgttaa

SEQ ID NO: 214 - DNA, 4806 bp, Turnip vein-clearing virus
  source 1..4806: mol_type = other DNA
atggcacaatttcaacaaacaattgacatgcaaactctccaagccgctgcgggacgcaacagcttggtgaatgatttggcatctcgtcgcgtttacgataatgcagtcgaggagctgaatgctcgttccagacgtcccaaggttcatttctccaaggcagtgtctacggaacagacactgattgcaacaaacgcatatccggagttcgagatttcctttactcatacgcaatccgctgtgcactccttggccggaggccttcggtcacttgagttggagtatctcatgatgcaagttccgttcggttctctgacgtacgacatcggcggtaacttttccgcgcaccttttcaaagggcgcgattacgttcactgctgcatgcctaatctggatgtacgtgacattgctcgccatgaaggacacaaggaagctatttacagttatgtgaatcgtttgaaaaggcagcagcgtcctgtgcctgaataccagagggcagctttcaacaactacgctgagaacccgcacttcgtccattgcgacaaacctttccaacagtgtgaattgacgacagcgtatggcactgacacctacgctgtagctctccatagcatttatgatatccctgttgaggagttcggttctgcgctactcaggaagaatgtgaaaacttgtttcgcggcctttcatttccatgagaatatgcttctagattgtgatacagtcacactcgatgagattggagctacttttcagaagtccggtgataatttaagttttttctttcataatgagagcactctcaattacacccacagttttagtaatataattaagtatgtgtgtaaaacgttctttcctgctagtcaacggtttgtgtatcataaggagtttttagttactagagtcaacacttggtactgtaagtttacgagagtggatacttttactcttttccgtggtgtgtaccataataatgtggattgcgaagagttttacaaggctatggacgatgcgtggcactacaaaaagacgttagcaatgcttaatgccgagaggaccatcttcaaggataacgctgcgttaaacttttggttcccgaaagtgagagacatggttatcgtccctctctttgacgcttctatcacaactggtaggatgtctaggagagagattatggtgaacaaggatttcgtttatacggtcctaaatcacataaaaacgtatcaagctaaggctttaacttacgcaaatgttctgtcctttgtggagtctattaggtctagagtgataattaacggtgtcactgccaggtctgaatgggacacagacaaggcaattctaggtccattagcaatgacatttttccttataacaaagttgggtcatgtgcaggatgaaataatcctgaaaaagttccagaagttcgacagaaccaccaatgagctgatttggacaagtctctgcgatgccctgatgggggttattccctcggtcaaggagacgcttgtgcgcggtggttttgtgaaagtagcagaacaagccttagagataaaggttcccgagctatactgtacctttgccgacagattggtactacagtacaagaaggcggaggagttccaatcgtgtgatctttccaaacctctagaagagtcagagaagtactacaacgcattatccgagctatcagtgcttgagaatctcgactcttttgacttagaggcgtttaagactttatgtcagcagaagaatgtggacccggatatggcagcaaaggtggtcgtagcaatcatgaagtcagaattgacgttgcctttcaagaaacctacagaagaggaaatctcggagtcgctaaaaccaggagaggggtcgtgtgcagagcataaggaagtgttgagcttacaaaatgatgctccgttcccgtgtgtgaaaaatctagttgaaggttccgtgccggcgtatggaatgtgtcctaagggtggtggtttcgacaaattggatgtggacattgctgatttccatctcaagagtgtagatgcagttaaaaagggaactatgatgtctgcggtgtacacagggtctatcaaagttcaacaaatgaagaactacatagattacttaagtgcgtcgctggcagctacagtctcaaacctctgcaaggtgcttagagatgttcacggcgttgacccagagtcacaggagaaatctggagtgtgggatgttaggagaggacgttggttacttaaacctaatgcgaaaagtcacgcgtggggtgtggcagaagacgccaaccacaagttggttattgtgttactcaactgggatgacggaaagccggtttgtgatgagacatggttcagggtggcggtgtcaagcgattccttgatatattcggatatgggaaaacttaagacgctcacgtcttgcagtccaaatggtgagccaccggagcctaacgccaaagtaattttggtcgatggtgttcccggttgtggaaaaacgaaggagattatcgaaaaggtaaacttctctgaagacttgattttagtccctgggaaggaagcttctaagatgatcatccggagggccaaccaagctggtgtgataagagcggataaggacaatgttagaacggtggattccttcttgatgcatccttctagaagggtgtttaagaggttgtttatcgatgaaggactaatgctgcatacaggttgtgtaaatttcctactgctgctatctcaatgtgacgtcgcatatgtgtatggggacacaaagcaaattccgttcatttgcagagtcgcgaactttccgtatccagcgcattttgcaaaactcgtcgctgatgagaaggaggttagaagagttacgctcaggtgcccggctgatgttacgtatttccttaacaagaagtatgacggggcggtgatgtgtaccagcgcggtagagagatccgtgaaggcagaagtggtgagaggaaagggtgcattgaacccaataaccttaccgttggagggtaaaattttgaccttcacacaagctgacaagttcgagttactggagaagggttacaaggatgtgaacactgtgcacgaggtgcaaggggagacgtacgagaagactgctattgtgcgcttgacatcaactccgttagagatcatatcgagtgcgtcacctcatgttttggtggcgctgacaagacacacaacgtgttgtaaatattacaccgttgtgttggacccgatggtgaatgtgatttcagaaatggagaagttgtccaatttccttcttgacatgtatagagttgaagcgggggtccaatagcaattacagatcgatgcagtattcagggacagcaacttgtttgttcagacgcccaagtcaggagattggcgagatatgcaattttactatgacgctcttcttcccggaaacagtactattctcaatgaatttgatgctgttacgatgaatttgagggatatttccttaaacgtcaaagattgcagaatcgacttctccaaatccgtgcaacttcctaaagaacaacctattttcctcaagcctaaaataagaactgcggcagaaatgccgagaactgcaggtttgctggaaaatttggttgcaatgatcaaaagaaacatgaatgcgccggatttgacagggacaattgacattgaggatactgcatctctggtggttgaaaagttttgggattcgtatgttgacaaggaatttagtggaacgaacgaaatgaccatgacaagggaaagtttttctagatggctttcgaaacaagagtcatctacagttggtcagttagcggactttaactttgtggatttgccggcagtagatgagtacaagcatatgatcaagagtcaaccaaagcaaaagttagacttgagtattcaagacgaatatcctgcattgcagacgatagtctaccattcgaaaaagatcaatgcgattttcggtccaatgttttcagaacttacgaggatgttactcgaaaggattgactcttcgaagtttctgttctacaccagaaagacacctgcacaaatagaggacttcttttctgacctagactcaacccaggcgatggaaattctggaactcgacatttcgaagtacgataagtcacaaaacgagttccattgtgctgtagagtacaagatctgggaaaagttaggaattgatgagtggctagctgaggtatggaaacaaggacacagaaaaacgaccttgaaagattatacggccggagtcaaaacatgtctttggtatcaaaggaaaagtggtgatgtgacaacctttattggtaataccatcatcattgcagcctgtttgagctcaatgatccccatggacaaagtgataaaggcagctttttgtggagacgatagcctgatttacattcctaaaggtttagacttgcctgatattcaggcgggcgcgaacctcatgtggaacttcgaggccaaactcttcaggaagaagtatggttacttctgtggtcgttatgttattcaccatgatagaggagccattgtgtattacgatccgcttaaactaatatctaagttaggttgtaaacatattagagatgttgttcacttagaagagttacgcgagtctttgtgtgatgtagctagtaacttaaataattgtgcgtatttttcacagttagatgaggccgttgccgaggttcataagaccgcggtaggcggttcgtttgctttttgtagtataattaagtatttgtcagataagagattgtttagagatttgttctttgtttga

SEQ ID NO: 215 - DNA, 4839 bp, Pepper mild mottle virus
  source 1..4839: mol_type = other DNA
atggcttacacacaacaagctaccaacgccgcattagcaagtactctccgagggaataaccccttggtgaacgatcttgctaatcggagactgtacgaatcagcggtcgaacaatgcaatgcacatgaccgcaggcccaaggttaattttttaaggtcgataagcgaagagcagacgcttatcgcaactaaggcctaccctgagttccaaatcacgttctacaacacgcagaacgctgtgcacagtctcgcaggtggacttcggtctttggaactagaatacttgatgatgcagatcccctacggttcaacgacatatgatatcgggggaaattttgctgctcacatgtttaaaggtcgtgactacgttcattgctgcatgcctaacatggacttacgtgacgtcatgcgtcacaatgctcaaaaggatagcattgaactgtacctttcaaagcttgcgcaaaagaaaaaggtaataccgccatatcaaaagccatgctttgataaatacacggacgatccgcaatcagtagtgtgctcgaaaccttttcagcactgcgaaggcgtttcgcactgcacggataaagtatacgctgtcgctttgcacagtttatacgacattccagcagatgaatttggggcagcacttctgaggagaaatgttcatgtctgctatgctgccttccacttttctgagaatcttcttttagaagattcgtatgtcagtcttgacgacataggcgctttcttctcgagagagggcgatatgttgaacttttcttttgtagcagagagtactttaaattatactcattcctatagtaatgtgcttaagtatgtgtgtaagacttacttccccgcttctagtagagaagtgtacatgaaggagtttttggtaactagggtaaatacttggttttgtaagttttcaaggttagatacctttgtactatatagaggtgtataccacagaggtgtagacaaggagcaattttacagtgcaatggaagatgcttggcattacaaaaagactttggcgatgatgaatagcgaaagaatcctcttagaggattcatcgtctgttaattattggtttccaaagatgaaagatatggtgatagtacctttgttcgacgtatctttacagaacgaggggaaaaggttagcaagaaaggaggtcatggtcagcaaggacttcgtttatactgtgcttaatcatattcgcacataccagtcgaaagcgcttacttacgccaatgtattatcgttcgttgagtcgataagatcaagagtgataatcaatggggtgactgcgcgctcagagtgggatgtggataaggctttgttgcagtccctgtcaatgacttttttcttgcagaccaaattggccatgctcaaggatgacctcgtggttcagaaattccaagtgcattccaaatcgctcactgaatatgtctgggatgagattactgctgcttttcacaattgttttcctacaatcaaggagaggttgattaacaagaaactcataactgtttcggaaaaggctcttgaaattaaagtacctgatttgtatgtaactttccacgatagattggttaaggagtacaagtcttcggtggaaatgccggtactggacgttaaaaagagcttggaagaagcagaagtgatgtacaatgctttgtcagaaatctcaattcttaaagacagtgacaagtttgatgttgatgttttttcccggatgtgtaatacattaggcgtagatccattggtggcagcaaaggtaatggtagctgtggtttcaaatgagagtggtttgaccttaacgtttgagaggcctaccgaagcaaatgtcgcacttgcattgcaaccgacaattacatcaaaggaggaaggttcgttgaagattgtgtcgtcagacgtaggtgagtcctcaatcaaggaagtggttcgaaaatcagagatttctatgcttggtctaacaggcaacacagtgtccgatgagttccaaagaagtacagaaatcgagtcgttgcagcagttccatatggtatccacagagacgattatccgtaaacagatgcatgcgatggtgtatactggtccgctaaaagttcaacaatgcaagaactatttagacagcctggtagcctcgctctctgctgcggtatcaaacctgaagaagataatcaaagacacagctgctatagatctcgagactaaggaaaaatttggagtctacgacgtgtgccttaagaaatggttggtgaaacctctatcaaaaggacatgcttggggtgtggtgatggactcagactataagtgctttgttgcgcttctcacatacgatggcgagaacattgtgtgcggagagacatggcgtagagtcgcagtgagctccgaatctttggtgtattcagatatggggaagataagagctatacgctctgtgcttaaagacggtgaaccccatataagcagtgcaaaggttacacttgttgatggtgttcctggttgcggaaagacaaaggagattctttcgagggtcaactttgacgaagatctagttctggtaccaggaaaacaggctgctgaaatgataagaagaagggcaaacagttctggtttaatcgtggcgaccaaggagaatgtaaggacggtagactctttcttaatgaattacggtcgaggtccgtgccaatacaaaaggctgtttctggatgaaggtctaatgttacaccctggttgtgttaattttctggttggcatgtctctatgctccgaggcttttgtttatggagacacccagcagattccttacatcaacagagttgcaacttttccctatcctaagcatttgagtcaactcgaggtcgatgctgttgaaactcgcagaacaacgttgcggtgtccagctgatatcaccttcttcttgaatcagaagtacgaagggcaagttatgtgcacatcaagtgttacacgctcggtgtcacacgaggtcatccaaggtgcagcggtaatgaatccagtgtctaaaccacttaaagggaaggtgattacattcactcagtcagacaagtcattgctgctctcgaggggttacgaagatgtgcataccgttcatgaggtgcaaggggaaacgtttgaagacgtctcactagtgaggctgacgccaacacccgtgggaataatttcaaagcagagtccgcacctgttggtctcattgtctaggcatacaaggtcgatcaaatattacacagttgtgctagatgcagtcgtttcagtgcttagagatctggagtgtgtgagtagttacctgttagatatgtacaaagttgatgtgtcgactcaatagcaattacagatagaatcggtgtacaaaggtgttaaccttttcgtcgcagcaccaaaaacaggagatgtttctgacatgcaatattattacgacaagtgtttgccgggaaacagtactatactcaatgagtatgatgctgtaactatgcaaatacgagagaatagtttgaatgtcaaggattgtgtgttggatatgtcgaaatcggtgcctcttccgagagaatctgagacgacattgaaacctgtgatcaggactgctgctgaaaaacctcgaaaacctggattgttggaaaatttggtcgcgatgatcaaaagaaatttcaactctcccgaattagtaggggttgttgacatcgaagacaccgcttctctagtagtagataagttttttgatgcatacttaattaaagaaaagaaaaaaccaaaaaatatacctctgctttcaagggcgagtttggaaagatggatcgaaaagcaagagaagtcaacaattggccagttggctgattttgactttattgatttaccagccgttgatcaatacaggcacatgatcaagcagcagccgaaacagcgtttggatcttagtattcaaactgaatacccggctttgcaaactattgtgtatcatagcaagaaaatcaatgcgctttttggtcctgtattttcagaattaacaagacagctgctagagacaattgacagttcaagattcatgttttatacaaggaaaacgcctacacagatcgaagaatttttctcagatctggactctaatgttcctatggacatattagagctagacatttccaagtatgacaaatcacagaacgaatttcattgtgcagtcgagtatgagatttggaaaaggttaggcttagacgatttcttggctgaagtttggaaacacgggcatcggaagacaacgttgaaagactacacagccggaataaaaacgtgtttgtggtaccagaggaaaagcggtgatgtcaccacattcattggaaacacgatcattattgctgcatgtctgtcctctatgctaccgatggagagattgattaaaggtgccttttgtggtgatgatagtatattatactttccaaagggcactgatttccccgatattcaacagggcgcaaaccttctctggaattttgaagccaagttgtttaggaagagatatggttacttttgcggtaggtacataattcaccatgacagaggctgtattgtatattatgaccctctaaaattgatctcgaaactcggtgcaaaacacatcaagaatagagaacatttagaggaatttaggacctctctttgtgatgttgctgggtcgttgaacaattgtgcgtactatacacatttgaacgacgctgtcggtgaggttattaagaccgcacctcttggttcgtttgtttatagagcattagttaagtacttgtgtgataaaaggttatttcaaacattgtttttggagtaa

SEQ ID NO: 216 - DNA, 2391 bp, Turnip crinkle virus
  source 1..2391: mol_type = other DNA
atgcctcttctacacacactcaacacagcgctcgcagtgggactcctaggagccaggtactaccctgaggttcaaaccttcttggggctgcctgactacgtgggtcacatgaagaatgtagtacggtctgttttccagggatctgggctagtagtagtgtcctccgacacagtcggtgtcagggggacgtatagtaatagaggtcagataggtagtagtctcgggtgtatactagccgttccggatagcggggcggatatagaaatagacttagataggttggtaggaacggaagaggaagccacatcctgtttggtggaggcggtaggtagtaccgcagatgtccccaggaggagagttcgtcaaaaggggcggtttgccatgcatgccgtcaacgcagcaaagctgcacttttgtggcgtcccaaaacccactgaagcgaatcgactagcggtctcaaaatggcttgtccaatactgcaaagagagacatgtcgtagacagccacatcagaacgatagtcaatacggctcttcctagagtgttcacgcctgacgcggaagacattcaggtcgtgctggatttgcacagtgtaagagcacacgaccaccgcaacgccctagccgaagcaggcaaagtgcggaagtggtgggtcaatctcgcgatgcatcccatgactgggaggtcgtggtccagggcttggaggcgattatgccgactgcctgacgaccaggcgatctcttttgtccgctaggggtgcttgcgggagctggtcgggagggagactcaaatctccaggggtgaaaacccggccatgcgcgtgttcccgttagcaaatcccccgaaggttcgacgcatcttccatatctgtggaatgggcaatggtttagactttggagtccacaacaactcactcaacaatttgagaagagggttgatggaaagagtcttttacgttgaagatgcgcagaagcaattgaaaccagccccccaaccgatcccagggattttcgggaagttgagtgggattcggagacgattggtcaggttggccggaaatcatacccctgtgcctcgggagaaatacccgtcgttctacaagggcaggagggccaccatataccaaaaggctttggattctctacatgacagaccggtatcccggaaggacgcagaactcaaaacattcgtgaaggcagaaaagatcaatttcacggctaagaaagacccggctccacgggtcatccagccgagggacccacgatataatattgaggttgggaaatacttgaaaccgtacgagcaccatttatatcgggcaattgacgctatgtggggtgggcccactgtgctgaaaggatacgatgtgggggagcttggaaacattatgagtaacacctgggataaattccggaaaacgtgtgcgataggatttgacatgaagagattcgaccagcacgtatccgtggacgccctacgatgggaacacagtgtatacaacgcgggctttaactgtcccgagttggcacagctgctaacttggcagttgaccaacaagggggttgggagagcctccgatggctttatcaaataccaagttgatggttgtcgcatgtccggagatgttaacacagccttgggcaactgcctactggcttgctctatcaccaagtacttaatgaagggaatcaaatgcaaattaatcaacaatggagacgattgtgtgctgttcttcgaagctgatgaagtcgacagggtgcgcgaaaggctgcatcattggatcgactttgggtttcaatgcatagcggaagaaccacaatacgaattggagaaagttgaattttgccagatgtcccctattttcgatggtgaagggtgggtcatggtcagaaacccccgtgtgagcctctccaaggacagctacagcaccacacaatgggcgaatgagaaagatgcagccagatggttggctgccatcggagagtgtggcttggctattgcaggtggcgtaccagtgttacaatcatattattcttgcctgaagaggaattttggacccctggccggggactacaagaagaagatgcaagatgtttcctttgatagtggattctacaggttatccaagaacgggatgaggggcagcaaagacgtgtcccaagatgctaggttcagcttttaccgggggttcggctacactccagacgagcaggaagcgcttgaggagtactacgacaacctcgaactgctctgtgagtgggaccccacgggatataaagaagaacttagtgatagatggatcctgaacgaattccctacaactctctaagcgacagcgacgcaacaggaaaacggaagaaaggcggagagaaaagtgcgaagaagagattgg

SEQ ID NO: 217 - DNA, 816 bp, Turnip crinkle virus
  source 1..816: mol_type = other DNA
atgcctcttctacacacactcaacacagcgctcgcagtgggactcctaggagccaggtactaccctgaggttcaaaccttcttggggctgcctgactacgtgggtcacatgaagaatgtagtacggtctgttttccagggatctgggctagtagtagtgtcctccgacacagtcggtgtcagggggacgtatagtaatagaggtcagataggtagtagtctcgggtgtatactagccgttccggatagcggggcggatatagaaatagacttagataggttggtaggaacggaagaggaagccacatcctgtttggtggaggcggtaggtagtaccgcagatgtccccaggaggagagttcgtcaaaaggggcggtttgccatgcatgccgtcaacgcagcaaagctgcacttttgtggcgtcccaaaacccactgaagcgaatcgactagcggtctcaaaatggcttgtccaatactgcaaagagagacatgtcgtagacagccacatcagaacgatagtcaatacggctcttcctagagtgttcacgcctgacgcggaagacattcaggtcgtgctggatttgcacagtgtaagagcacacgaccaccgcaacgccctagccgaagcaggcaaagtgcggaagtggtgggtcaatctcgcgatgcatcccatgactgggaggtcgtggtccagggcttggaggcgattatgccgactgcctgacgaccaggcgatctcttttgtccgctaggggtgcttgcgggagctggtcgggagggagactcaaatctccaggggtgaaaacccggccatg

SEQ ID NO: 218 - DNA, 2457 bp, Tomato bushy stunt virus
  source 1..2457: mol_type = other DNA
atggagaccatcaagagaatgatttggcctaagaaagagatttttgtgggtgatttcgcaaccggagtgaataggacagttccggtgaacatctttcaattggtgtgtcgtgtggttctgagatacatgaggacagggaaaatagagtgtgattctgacagcatgactaagtttatagttgaattactcaaaactgattgtgctgccaaatgggaatggttcatgaagagacggcagaggggtgattacattgtccctctatctatagcctccataccaatcataccgctgttgagttatgccactagggtacgcgcagtctcagtcaaggcttttggcaatgaactatcgttcaatgtcagggtgcctagaccatctgtacctaagaaaggattgctcctcagactggcggcaggtctagcgttagctcctatatgcgcgctggccgtgtacgctaccctacctagggaaaaactgtcggtatttaagctgagaactgaggcacgagcacacatggaggatgagagagaagcgacagattgtctggtggttgagccggcaagggaacttaagggtaaagatggtgaggatctcctcactggtagtagattgactaaggtgatcgcgtccactgggcgccctcgtcgaagaccttatgcggcaaagatcgcacaggtggcgagagcaaaggtgggttaccttaagaacagtccagagaatagactaatctaccagagggtgatgatcgagatcatggacaaagactgcgtcaggtatgttgacagggatgtcatattgcctttggctattggatgctgttttgtctatccggatggagtggaggagtcggcggcactatggggctcacaggagtccctgggtgtcaaatagggaggcctagtacgtctacctggggttgtaacacagatcaatcgagatatcccatctgatgtgttacttcctcaggaggtgctagaggttcgtacaggacctcccaatgctaaggaccgtaatatatttatggttgcaggttgcccatcacaggcacggttcttagtacataatcactgcctgaaaaaccttaaaaggggtcttgtggagagagtcttctgcgtagagagaaacgggaagctcgctcgcactccacaacctaccaaaggagcctttggacgtctttccccgttcaggaaagcggtttgtgagaaggttggggtagcccaccgacttgggtatgatgggtttctgtcatactacagcggtgcgaaactccgtacttacacacgagccgtggagagtctgcatatcacacctgtctccgagagggatagtcacttgactaccttcgtaaaagcagagaagatatcgacgtctaagggtgacccagcacctcgggtgattcagcctcgaaacccgaggtacaatgtggaacttggaagatatctacggcatatggaatccaagctgatgaaagctgttgatggcgtgttcggagagacgacatgcatcaaaggatacacagctgatgaggtaggtgcaattttccgggctaaatgggacaggtttgataagcctgtcgccatagggctcgatgcatctaggtttgatcaacactgttccgttgaagcattgcaatatgagcatagcttctacagggccatgtaccctggcaacaagctcttgggcaagttgttggaatggcagctccataataaaggtaaaggttatgttccagatggaactataacctatcgcaaggagggctgtcgcatgagtggggatataaacacctcgttgggcaactatctactgatgtgtgcaatggtacatgggtacatgcgtcatctggggattaatgagtttagtctggcaaactgtggggatgattgcgtcctaattgtcgaacgcaggaatcttaagcagatacagagaactttaccggagtatttcctcaatctgggatatactatgaaggtggagcaacctgtatttcaactggaagaggttgaattttgccaggcacacccagtacagtttcaaggcggttggaagatggttcgaaacgtccgtactgctatgagcaaggatgtgcactgtgtcaacaatatacgcgatttggcgacgaggagagcttggagtaatgctcaacatcatgggggtctagcgcttagtgctggtattccagttgtggagacgttttactctaggtttaagctttatgatgtacctcgtaaacatcaacgtattgacacggtcacaaatgtgcacaagtggcgtggatccggtgggagttatgttgtgacccctgaatctagggctagcttttgggctgcctttggactcacgggggatgagcaactggctctggaggaccgtctggaaagatgggagatggatctgtttggagaggagggtgttgacgctcatgagcccagcatcctcgactccgccgtagcttga

SEQ ID NO: 219 - DNA, 891 bp, Tomato bushy stunt virus
  source 1..891: mol_type = other DNA
atggagaccatcaagagaatgatttggcctaagaaagagatttttgtgggtgatttcgcaaccggagtgaataggacagttccggtgaacatctttcaattggtgtgtcgtgtggttctgagatacatgaggacagggaaaatagagtgtgattctgacagcatgactaagtttatagttgaattactcaaaactgattgtgctgccaaatgggaatggttcatgaagagacggcagaggggtgattacattgtccctctatctatagcctccataccaatcataccgctgttgagttatgccactagggtacgcgcagtctcagtcaaggcttttggcaatgaactatcgttcaatgtcagggtgcctagaccatctgtacctaagaaaggattgctcctcagactggcggcaggtctagcgttagctcctatatgcgcgctggccgtgtacgctaccctacctagggaaaaactgtcggtatttaagctgagaactgaggcacgagcacacatggaggatgagagagaagcgacagattgtctggtggttgagccggcaagggaacttaagggtaaagatggtgaggatctcctcactggtagtagattgactaaggtgatcgcgtccactgggcgccctcgtcgaagaccttatgcggcaaagatcgcacaggtggcgagagcaaaggtgggttaccttaagaacagtccagagaatagactaatctaccagagggtgatgatcgagatcatggacaaagactgcgtcaggtatgttgacagggatgtcatattgcctttggctattggatgctgttttgtctatccggatggagtggaggagtcggcggcactatggggctcacaggagtccctgggtgtcaaatag

SEQ ID NO: 220 - DNA, 8640 bp, Tomato spotted wilt orthotospovirus
  source 1..8640: mol_type = other DNA
atgaacatccagaaaatacaaaaattaatagaaaatggaaccactttattgttatctattgaggattgtgtaggttctaaccatgatctggctttggatttacataagagaaatagtgatgagattccagaagatgtgattattaataataatgcaaaaaactatgagacgatgagagaattaattgtcaaaatcactgctgatggagaagggctaaacaaagggatggcaactgtggatgttaagaagctaggtgagatggtctctctgtttgagcaaaaatacttagaaacagagttagcaaggcatgatattttcggagagctgatctccagacacctaagaataaaacccaaacaaagaagcgaggtggagatagagcatgcactcagagaatatctggatgatctcaacaaaaagtcctgtgttaacaagctttctgatgatgagtttgagagaataaacaaagaatatgtggcaactaacgccacccctgataactatgtaatatataaagaatcaaaaaacagtgaactctgtttaatcatttatgattggaaaatatctgttgatgccaggactgaaaccaaaacaatggaaaaatactacaaaaatatctggaaatctttcaaagatataaaagtgaatggaaagccattcctagaagatcaccctgttttcgtttctattgttatattgaaacctattgctggaatgccaatcactgttactagcagtagggtattgggaaaatttgaagactctccatcagcattgcatggagaaagagtaaagcatgctagaaatgccaaactgctaaatatttcttatgttggaaaaatcgtaggaaccacgcccacagtggtgagaaactattatgcaaacactcagaaaatcaaatctgaagtcagaggaatcttaggtgatgattttggatccaaagatgtgttttttagtcactggactagcaaatacaaagagagaaatcctactgaaatagcctattctgaagatattgaaagaataattaactcacttgttacagaagaaatccctaaggaagagataatacattttttgtttggaaatttctgtttccacattgaaacgatgaatgaccagcatattgctgacaaatttaaagggtaccaaaactcttgtattaatttaaaaatagagccaaaagctgatttagctgatttgaaagaccacttgatccaaaaacagcaaatatgggaatctttgtatgggaaacaccttgagaagatcatgcttagaattagagaaaaaaagaaaaaagagaaagaaatacctgacataactacagcttttaaccagaatgccacagaatatgaagaaaagtatcctaactgttttacaaacgatctttctgaaactaaaactaacttttccatgacttggtccccaagttttgaaaaaattgaattgggctcagaagtagattacaataacgcaatcataaacaaatttcgggaaagcttcaaaagttcttcaagaattatttacaatagcccatatagtagcataaataaccaaacaaacaaagcaagagatataacaaacttggttagactgtgtttaacagagttaagttgtgatacaacaaaaatggaaaaacaggaacttgaggatgaaatagatataaacactgggagcattaaagttgagagaacaaaaaaatctaaagaatggagtaagcagggttcatgtttgaccaggaacaaaaatgaattttgcatgaaagagacaggcaaggagaacaaaactacctattttaaaggtttagcagtaatgaatataggaatgagctctaagaaaagaattctaaaaaaagaagaaataaaagaaaggatttctaaaggcctggaatatgatacctcagaaaggcaggctgacccaaatgatgattattcaagtatagacatgtcttctctgactcataggaaaaaactaattaggcacgacaatgaggacagcttaagctggtgtgaaagaattaaagattctttgtttattcttcataatggtgatataagagaggaaggcaagatcacatctgtttacaataattatgctaaaaatcccgaatgcttgtacattcaagattcagtattgaaagctgaactggagacttgtaaaaaaataaacaaattatgcaatgacctagccatttaccattactctgaagacatgatgcaattctccaaaggtttgatggtggcagacaggtatatgactaaagaaagtttcaagatactaactacagcaaatactagcatgttgctactggcatttaaaggagatggaatgaacaccggaggatcgggagttccttacatagcattgcacatagtggatgaagacatgtcagatcaatttaacatatgttatactaaagaaatttatagctatttccgaagtggtagtaattacatttatataatgagaccgcagagactcaaccaggtgaggctgctgagccttttcaaaacgcctagcaaagttcctgtatgttttgcacaattttcaaagaaagctaacgaaatggaaaaatggctgaaaaacaaagatatagaaaaagtgaatgtcttttctatgacaatgactgtaaaacagatattaataaatattgtattctcgtctgtcatgataggtactgtgacaaagctcagcaggatgggaatttttgatttcatgcggtatgctgggtttttgccactgtctgattattctaatataaaagaatacattagagataaatttgaccctgatataactaacgtggcagatatatattttgttaatggaatcaaaaaactattgttcagaatggaagatctcaatttaagcacaaatgccaagcctgttgtcgtagaccacgaaaacgatattataggaggtataacaaacttgaatataaaatgtccaataacaggatcgactttactaacactagaggatttgtacaataatgtttatttggctatttatatgatgcctaaatcattgcacaatcatgttcacaatctaacaagtttgttaaatgtccctgctgagtgggagctaaagttcagaaaagaattaggtttcaacatatttgaagacatataccctaagaaagcaatgtttgacgacaaagacctattctctataaatggagctctgaacgtgaaagcattatccgattactatctagggaatatagacaatgttggtttgatgagatcagaaatagaaaataaagaagatttcctgagcccgtgttacaagatatctactttaaaatcttcaaaaaagtgctcacaatcaaacattataagcactgatgagataatagagtgtctccagaacgcaaagattcaagatatagaaaactggaaagggaataatttggctattataaaagggcttataagaacttacaatgaggaaagaaatcgattagtggaattctttgaagataattgtgtcaattcgttgtatcttgtagaaaagcttaaagagataattaatagtggattgataactgcagggaaatctgtaacatccaaattcataagaaataaccatccattaacagtagaaacatatctcaaaacaaaactatattatagaaataatgtaacagttttaaagtctaaaaaagtgtcagaggagctttatgaccttgtaaaacagtttcataacatgatggaaatagatctagattctgttatgaaccttggtaaaggcacagaagggaagaaacacacattcttgcagatgcttgaatttgtcatgtccaaggctaaaaatgtcacagggtctgtagattttttagtttctgtttttgaaaaaatgcagagaactaaaacagacagagaaatatacttgatgagcatgaaagtgaaaatgatgctttactttatagagcacacattcaaacatgtagcacagagtgatccatcagaagctatctctataagtggagacaacaaaataagggcactttctacattatctttggacacaatcacatcttacaatgatattttgaacaaaaattcaaagaagtcaagattggctttcttatctgccgatcagtcgaaatggtcagcatcagaccttacctataaatatgttttagctatcatattaaatccaattttaactactggtgaagccagcttgatgatagaatgcattttaatgtatgttaaattgaaaaaggtttgtataccaacggatatttttttgaacctaagaaaagctcaaggaacttttgggcaaaatgaaactgccataggacttttgactaaaggtttgacgacaaacacatacccggttagcatgaactggttgcaaggcaatttaaattatctgtcgtctgtttatcattcttgtgcaatgaaagcttatcacaagactctagaatgttacaaagactgcgatttccaaactagatggattgtgcactctgatgacaatgcgacatcattgatagccagtggagaggtcgataaaatgctaacagatttttcaagctcatctctgccagaaatgttgtttagaagcattgaagctcatttcaaaagcttttgcataactttgaaccctaaaaagagttatgcttcttcatcagaagtagagtttatatctgaaagaattgtaaatggagcaattattcctctctattgcagacatttagcaaactgttgcacagaatcttcacatataagttattttgatgatttgatgtcactcagtatacatgttacaatgcttttgaggaaaggctgtcccaatgaagtaataccttttgcttatggggctgtgcaagtacaagcattaagcatctattcaatgcttcctggtgaagtgaatgatagcattaggatttttaaaaaacttggagtaagtttaaaatcaaacgagattcccacaaacatggggggctggttaacttctcctatagagccattgtctatattaggtccatcatcaaatgatcaaattatctattacaatgtgataagagattttttgaacaaaaaaagtttagaagaggtcaaagatagtgtctcttcttctagttatctacagatgagattcagagagttaaaagaaaagtatgaaagaggaactctggaagaaaaagacaaaaagatgatatttcttactaatttgtttgagaaagcatcagtgtccgaagattcagacgttctaacaatcgggatgaaatttcaaaccatgttaactcagatcataaaattgcctaatttcataaatgaaaatgctttaaataagatgtcaagttataaggatttctcaaaactttaccctaatctaaaaaagaatgaagatctatataagagtactaagaacttgaagatagacgaggatgctgttttagaggaagatgagttatatgagaagattgcgtctagcttagaaatggagtctgtccatgacataatgataaaaaatcctgaaacaattctgatagcaccattgaatgatagggattttttacttagtcagctgtttatgtacacaagcccttccaaaaggaatcaattatcgaaccaatctacagagaaacttgctttagatagggtattaaggtcaaaagctagaacatttgtggacatttcttccactgtgaagatgacttatgaagaaaacatggaaaagaaaatcttagaaatgctaaaatttgatttagattcatattgttcatttaaaacatgtgtaaatctagtaatcaaagatgttaatttcagcatgctgattccaatattggattctgcatacccttgtgaatctagaaaaagagataattacaatttcaggtggtttcagactgagaaatggatacctgttgttgaaggctctccgggactagtagtgatgcatgctgtttatggatcaaattatatagaaaatttaggtttaaaaaacatccctctaacagatgatagcattaatgttttaacaagcacatttggaacaggtctaatcatagaagatgtgaaatctctagttaaaggtaaagacagctttgaaacagaggcttttagtaattctaatgaatgtcaaagattggtgaaagcatgcaactatatgatagcagcacaaaacaggcttttagcaattaacacatgcttcactaggaaaagcttccctttctattccaagttcaatctagggagaggatttatttcaaacacactagctctcctatccaccatctacagcaaagaagaatcctatcattttgtttctacagctagttataaactagacaaaaccatcagaactgtgataagcgctcagcaagatatgaacttggaaaaaatactggacactgctgtatacatatcagataaattgcagtcacttttcccaacaattactagagaagatatagctttgatattacaaaatgtgtgccttgacagcaagcctatatggcagagtctagaagacaaaatgaaaaggattaacaattcaacagctagtggcttcacagtatcaaatgtgatcctatcacataacagtgaattgaacacaatccagaaacaaattgtctggatgtggaacatgggtttgtgttctcatagaacattagattttgttatcagatatattcgaagaagtgatgtaagatatgtgaaaactgaagaacaagacgaatcacgaaattatgtctctggaacaatgtacaaaattgggatcatgacaagaagctgttatgttcaattgatagcttctgatcatgatgtagcagtttctttgagaacaccattcgagatattgaatgaaagagagtatctttttgatacatacagagagagtatagagaaattgctgcagaaatttatgtttgataaagtgaacataataaagtcaaaacaaccacagattgtcttcttagaaccaggagatgcctgcattagaatgactacagataacaaaatgattgtcaaggttaatgccacatcaagacaaataagactagagaatgtaaaattagttgtgaagataaaatatgaaaatgtgaactctgatgtatgggatattatagaaggccaaaagtctctagtcttgaggcttcctgaagtaggggaatgtttctctgatatgtacaaaactgcagactctgaaaccgaaacaatcaaaaccataaaaaacaggctcatgacctctttaactttcatagaagcctttggaaacttatcacagcagatcaaagagattgtatatgatgatatcagagaaacaatggatgaattcttaatgaacatccgggatacctgcttagaaggtttggaaaactgcaaaagtgtagaagaatatgataattatctcgatgaagatggttttaatgacacagtggaactattcgaaaacttgctaagaacacatgataactttgaagatgagtatagtcctctgttttcagagattgttgataaagcaaaacagtacactagagatttagaaggtttcaaagaaatactgctcatgcttaaatattccctgataaatgatgcatcgggatttaaaagctatagagccactggaatgcatgctgttgaactaatggcaaaaaaacacatagaaataggagaattcaacttgttaggaatgatccaactgattaaagcttgtgaaacatgccacaacaatgactctatattaaacttagcaagtttgaggaatgttcttagcaggacatatgccacattcgggaggagaataggattgaaccatgatctggacttgcaaaacaatttaatggaaaaaagttgtgatttcaagacgctggttttaccagacataaaattatcagaactatctagggagatactgaaagaaaatgggtttgttatatctggagagaatctaaaaatggataggtctgatgaagaatttgagggtcttgctagttttaatgtgttgaggctagatgaggaagaaatgtatgaaggtttgatcaaagaaatgaaaattaaaaggaaaaagaaagggtttttattcccggcaaatacacttctactaagtgagttgataaaattcttgattggagggataaagggaaccagttttgatatagagacattgttgcggaacagttttagaccagacatattttcgaccgacagattgggtaggttgagttctagtgtacctgcactcagagtttatgcaactgtttatatggaatataagaatgcaaattgtcccttaaatgagatagctgacagcttggaaggttatctaaaactgacaaaaagcaagcctaaggagcatttcttgcatggaagagtcaagaaagccttgatacaattaagagatgaacaatcacgaactaaaaaattagaggtttataaagatatcgcaaatttcctttccagacatccactatgtttgtcagagaaaaccttgtatggaagatacacctactctgatattaatgattatatcatgcaaacaagagagattattttgagtaaaataagtgagttggatgaggttgttgaaacagatgaggacaatttcttgcttagttatctaagaggagaagaagatgcctttgatgaagatgaaattgatgaagaagaagatacagattaa

SEQ ID NO: 221 - DNA, 8669 bp, Watermelon bud necrosis orthotospovirus
  source 1..8669: mol_type = other DNA
atgaacattcaaactataaacagttttctagatgcttcaggcgaaaccactgcatatctgcagagaataaaagatgaaatcatgttaatgtcaaatgttatagaacaaggttattctgaaggtaaaggtgtaattgaatctggattgagttctataatgtctatgaattatattctagacaagattgaagacatgaaatcaaaataccatcagagctcctcttctattgatcaaagagaaatggaaacagaaatctatttatttctcgataaatataaagaactagagttgatgaggcatgatctctttggtgttcttgctggaagaagattacattttgttccaaaacacagatctgatgtttttatgaaagattgtcttatgtcttatatagagttctgcagtgcttcagtgtccatttcgaacaaaatagacaaccttgatagtctaaaagaaaaattgatcttccagcacctaacaccagacaattacacaatatacaaagaaaccaaaggtgagaaagcatgtttgatgatatatgattggaaagtgtctgtagatgctgtgtctgaaggcaagacgtcagaaaactattacacaagtgtttggaaaacttttaaagatatcactatagacgaagaaccttttttagagagacacccaatattcataaccattgttgtgttgaatcctagcggtaatatgccaattgtggcaacaacttgccgggtcgtccaggagttcaggaactcaccatataaaaccttcaatgaccgcaaacgagctgctgaagcagcaaagctaatatcagttaattctctaggtcagcttataggtctgggtgctgactgttttaggcggttttactcagaaacacaatcgtttaagaactctctcttatctaaggttggcaagtatatgaacaggtcatcggaggttttctttagccactggtcatgtgaatacaggaaaactaatttatcaaacaatcaaattagtcaagatattattgatttgatcaattccttgcctaacgatgtggtggggaaggagatccttgttcattttctttttgggaattatttatacttcaaagagactatgagtgaacttcatctcaaagatagatttgaggggtacagatcacactgcaaaatgatgagaattcgtcctttggaaaatgaagaaaaacttaaagactatcttgatagaaatgagcatatttttgagagtttgtatgaaacacatctcaaaaagataaaatcagatgtgctactcagaaaatctaaagaaatagagatagaaagcatagagcgagctttcaacattaatgcagaggagtaccaaaaagagtatcctggatgtttcacaaatgatcttcaagaaactaaaacaaacttttcaatctgctggtcaccaatgacagaagaactaaagatgaatgatcttaattataataatgcaataatacaatctttcagagatgctttgagtgaacagccaaagcttattcaccataaatcatatggtggggctaaagtagacacttatttttccacaactctttttaatttagttagagcttgtctagtagatctaagtacagatacaacgggacattcaaaggctaccttagaagacgtagtggatattaaagatggcagcatccaggtaaaaagaactgaagcctcacagagatggagagaaatagggaatgtcaagactagaaatgggaatgagttcacgttatcaccgcaagcagacactgaagcaagaaagaattttttcagaggtttaaacttgatgtatgttgacatggggaagaaaaagaagatagatataaagaatgaattaaaaagcaagatccaggagtcaatggctcagcaaaagaatgaaaacatggatggcccgagcggggagtatgatgtgtcaaaagccaatatacctcaccaaacgagcctcaaagggatcacacataacaaaaagctaatcagacatgataacccagatgttaaatatcattgtgagtcaatgattgaatctatgtacgtccttcatggtatggacgaaagaaaagataaaaatagtaaaataaattctgtctacaatgaatattgctcaaatccttcttcactatttactaaaggcaatttgatagaaactgaaatgacaattgcaaagaatatccatgaagtagctaaggaactttcaatttacacatatagtgaagacatgatgcagatggcaaaaggtttgatggtggctgacaggtttatgaagaaaacagacttcaagatcttaacttgtgccaatacaagcatgatatgcctagcattcaaaggtgacggcataaacacagggaagtcaggtgtgccttacatcaccatacacaaggtagacaagagcatccaaccacactttgtttctttatacacaaaagaactaatagtgtcttttaaatcagagaattattttattaatatcatgaggccacaaaggctaaatcaggtgcgacttctcagcctgttcaaagctcctagtaaagtccctatcctcttttcacaatattccttattgagtacagagataaaaaaatggttgaatcagcaatccatagatgttttcacttgccctgaaaataagatccagtatctgcaaaagatattattctcctctgtgatcattggcactgtgaccaaactcagcagaatgggaatttttgatttcatgaggtatgcacggtttctaccactgtctgattattccaatataaaggaatatatagctgagaagtttgacccagatataacaaatgttattgattgtttttttgtttctggaattaagaatcttcttctgaaaatggaaggtataaatttaagtaatagtataaaacctctgactatagatcaagaaaatgatatgtctggaggtatatcagatttagacatcatatgccctatcacaggatctacactaaagactatagagtgtctgtataacaatgtctatcttgcaatttacatgatgccgaaatctctccacactcatgtacacaatctcacaacacttctgagtgtcccggctgaatgggaaattaagtttagagaaaaaatgggctttatgataggagatgaaattaaaccaaagaaagaaatgttcaatgattctggtccattctcaattaatggagtgctcaatgtgaaaactttgtttgattattacaagaaaaatattacaaatgttggtgcttgtagatcaaatatagaagaaaaagaggattttttgtctgctccatataaaataaaaactttaacatcatctaaaaaatgctcaaaggcagatatcataaaaagtacagagatagttgctgctttaaaatcatcatatggaaaacagccagatgatataaagggttcagacctttatatactgaagggagttctgaagtgttttgatgaagatagagattcattaaccaacttcttggaggtagaaggcttagaagagtcaaaatatttacatttttttaccaacatgatgtcaggtgataataaaatattgatgaaaactaaccaagacaaattttattataaaagtcatcctttgacagtggagacatttatgaaagttaggtatggttatttcaagacaaccactgttttaaaatcaaaaaaagtaagtgaggaattgtatgatttaatcaaagagttcaacaagataacagaggttgacctggaagctttggaaaagctaggtcgtggactaaaaggcaatcgagtcacatttatacaattattggaatttattttgatgaaatccagaaccaatgctgggaacacagatttcttggtatcaatatttgaaaagatgcagagaacaaagatggatagagagatttatcttatgagcatgaaaacaaaaatgatgttgtattttatagagcatacatacaagcatgtggctcaatctgatccttctgaagccatctcgatctctggagactacaaaattaaaaatttggcatctttatcatatgatactataactaattacaacacagctcttcagaaaaatcttgaatgcaaaatggcttttttatctgcagatcaatcaaaatggtctgcatcagatctaacctataaatacatcttggctgttattatgaatcctcttttaaccacaggagaaataaacctgatgtgtgagtgcataatgatgtatgtaaagttgaagagagtttgtattcctaccgacatctttctaaacctaaaaagagggcaaactgaatatggatcttatggaactgcactgtctgttttaacagataacttagaaacaaatacatttcctgtatccatgaactggctccaagggaatttgaattatctttcgtcagtgtaccactcttgtgcaatgatgggctatgaaaaagctatgaaaaagatgggaaactatgatttcactataagatggatggtgcattcagatgataatgctacttctatggtggttagaggggatataaaagaacttcttgccgagtttaattgcaccagtctgtcagaactgcttttccggagtatacaatcacattttaaaagttattgcataacattaaatccaaaaaagagctatgcctcagaatcagaggtagaatttatatctgaacgaataattaatggtgctgtcatacccttgtattgtagacacttagctaattgtagcacggaaagttcccataatagctattttggtgatctgatgtcactttctatacatataacaatgctcttaagaaaaggatgtcctaatgagctgataccatttgcttatgctgcaatacaaatccaatttctcagcatttactcaatgcttcctggggaagaaaatgatatatcaactattgtcaaagaaattgattttcccttatcaaaaagagaaatcccgatatgtgctggtggttggatgtatgcacctatagaattattgtctatcttaggtccttcatcaaacgatcaattgatttactacaaaatcatcctagatttttttaacctaaaagattttagtagtcttaagaaaagcgtcaactctttaggctacattgatttaagaatcaatgaattgttcaaaagaataaaatatcaaaaaataacaaatgcggataaaaaaatgatatgcatggttaacttatttaaaacaagtttgatgtctgaagactgtgacagtttaaatgtaggaatgaagttccaatccatgatcacacaaattataaaactacctagttttgttagtgaaggctcactgttgaagaactcaagtttccaagacttctgtaagctattccccaatttgaagaaaaacactgacatactcaacgcattaaaacctgttaacttggatgaaagaagccttgaagagttaaatgagagcaaatttttatcacaaatccagctagaagagttgagtaggcacatggcatctcatccagaatcgtttttgatagcaccaatgaatgacaaagattacattttgaccaatctctatacgtatagcagtgtaagcaaaaggaatcaaatgttaaatcaatcaactgagaaattggcattggatagaattttaaggtctaaagctaaaaccttcttagatcccaattcaaaagagatggtttcatataaagaaaatatgtctatgaaaatgagagagataatgagctatgctgggaatgacttcaaaattattaatactatatccagccttatggtgagagacatgaattttgaaatggtcgtctctttaatggagaacactgttgctaatgcttctattcctaaagcgaattataattttagatggttcataactgaaaaagtaccaagtgtcattgagggatcccccggtttaattgttatgtcagctgtttatggcatggattatttgatagagctaggactcaaaaaactccctttgacagaaacctctatctctatactgcatgacatctttggtaacagaaaaacatttgatgatgttaaagagtgtatacagaatgttaaaaagcaatacaagacagaagaatttcaaaatgcagatgttctaaagagatatgtattaagtataaattacatgatccagtcccaaaacaagcttctgtctatcaacacatgtttctccaggaagaatttccctttctattcaaaatataatctaggtaagacgttcataaccaatactttagctatatggagcactatatacagccgattgacaaatataaacttttacaccaatctgaattttgtaattgacaggagttctaggttgattatctcattgcaaagagacatgaatctagaaaaactaattgattgctgtgcctatgtttctgacagattgcaaagcttatttcccgatatgaccgtagagtctatccggcaagttttgtgcaggctaaattttaatggggtagatcttatgaagaaaatgaaatctgaaatagctgaggtaaaaagagccataaacaacataaagacatccactcatgtaactctctcattcaggccacaaatgatagcaatgagcaaacatgcagcatggttatacaattttggatatattaatgagaaagagttcaaatttgtcatagatcagatcagacaaagcgaagtccattatattaaaacagatgagcaagatgtcagaggttactatgtttcaggtcatacatacaaaatagggatcaaaacccagcataactatggacagcttgctatgtcaaaccaagatgtgtcaatccatctccactcaccgtatgaatacaagagagaagatgatgggaaaatatgggatgttcatgttagatctgtatataaattgcttcaaaagctcttaatggacaagcaaagtgtaattaaagcatttttaaatattagaacagaactaatgcccaatcaattttgtattcatgagagttcaaataaaactctattgatattgatcaatgatacaacccgaccaatctcattagagagaatcaaattcaaaggtgatataaaatacattccctcctctgactttgcctgggacatgatgagcaatcagtctaaatacagattgcgacaagcagaaacaggagaatgttacacagaattatacaaactaatagacaacaatgataatttgatgaacactattttaacaaatttaaagaaaagcttagaatatgggaatgaaatggagaaccttatagagcaatcaatccaagggatagatgatgcagatactattgaatatatccaagagtctgttgaccaaatccacaaattagccatagaaggtttagaaacatgtcagacatcagatgaatttgaaaactacctaaaaagagttgattttcaatctacagttgatttccataaagatcttttagagcagattgttgaggaaaaatatggttcagcagaaagactagatgttgctgtagagaagctaaccaaatggacaaacagtttatcaacatttaaagatgtgtgcacaatgttaaagttctccatggtcaatgattctaagggaattaaaacatataaagctaatggagctgatttccactcattatcagcaagtgaagtcatgacttcacaaggatttgatttgttcgaattactgaagttaataaaggcctgtgaagcttgccacaccagcaattcagtattgaacttaattgcttttaaaaatatcaaaaacaaaaccttcatcccagggtttaagagacacttgcccaatacagttcattttgactatgaaatgaaactaaataatgaagtgatgaacaaattctatgagtataaaacaatctcactacaagatataaaagtttctgatagagtaaagagggtccttgaaacaaatgggttcagtatcacaggccacaatttgaagttagaagaaacaaacttagaattgaaccccgtggagattatagatgactcttccacttatgatcaggttgccaagcaaatgaggttaacaaagaaaaagagctcatatcttatacctgctaacactctattgttaggagaactaatgaagttcttgatgctgtgcatcaaaggagaagaacatgatataatgaaacttttgagaagtcattttgcaatgcagcctgtaagagaaaatagattgctttgtatccaagatgctgttatgacatgcaggataagtggttatatccaaagacactttctcaatgacaagaaagaaatcgtactgttaggtgtagctgacagcttagagaacttcatttccttagcaactccaaactatgcaacacaggagccatttaaagcagaggctttgataaaaaaagccctggcagaagtgtatgattccggtaaatataagatactaaaaaatataagaaattatatagttgatgatgtagaatttcttacagaaaagtgtttatattcaaacataactaatgaggagataagcaacatgatatttaatgcagttagcaaaattgatctggaattatccaatttaaagccaaagaagagaaagaaaagactagacttacatgacgttttcaatggattcttgggatcagatgctactacttcggaacaacaataaaaaggaggtaatctatgggcgggaggaaagga

SEQ ID NO: 222 - DNA, 5535 bp, Turnip yellow mosaic virus
  source 1..5535: mol_type = other DNA
atggccttccaattagcattggacgcccttgcacccacgactcacagagatccctctctgcacccgattctcgaatccacagtggattcaattcgctcctcgatacagacctacccatggtccattccgaaggaacttctacccctactcaactcctacggcatcccaacatctggtttgggaacctcccaccacccccacgccgcccacaagacaatcgagacttttctcctttgcacccactggtctttccaggccaccactcccagctccgtcatgttcatgaaacccagcaagttcaacaaacttgcccaggtaaactcaaactttcgggagctgaagaactaccgcctgcaccccaacgacagcactcgttaccccttcacatcaccagaccttcccgttttccccaccattttcatgcacgacgccctgatgtattaccatccgtcccagatcatggacctgttcttncggaaaccaaacctcgaacgtctgtacgccagcctcgtagtgccacccgaggcccatctttccgaccaatccttctacccaaagttgtacacgtacacgacgacccgccacactcttcactacgtcccagagggtcacgaagccggcagctacaaccaaccgtccgacgcccactcttggctccgaatcaattccattcgcctcggcaaccaccacctctcagtgacgatcctggaatcctggggccccgtccactcgctcctcattcaacgagggacccccccccccgacccatcactccaggcccctccaacactcatgncctcagacctctttcggtcttaccaagancctcgcctcgacgtggtctccttccgaatccccgacgccatcgaacttccacaggccacattcctccaacaaccacttcgagaccgactggtcccccgagccgtctacaacgccctgttcacctataccagagcagtccgcacactccgaacttcagacccagcagcattcgtaaggatgcactcctccaaaccggaccacgattgggtcacctcgaacgcctgggacaacctgcaaaccttcgcacttctgaacgttcccctccgaccaaacgtcgtctaccacgttcttcagagcccaatcgcctccctaagcctttacctgaggcaacattggcgccgtcttaccgccaccgccgtccctatcctctccttcctaaccctcctgcagcgcttccttccattgcctatacctctagcagaggtaaaatccatcacagccttccgaagggagctttaccgaaagaaggagccccaccaccccctcgacgtcttccatctccagcaccgcgtccgcaactaccactccgcgatctcggccgtacgcccggcttccccaccccaccaaaaactcccacacgcactccagaaagccgcattactgcttctccgaccgatatcgcccctcttgacagcgaccccgttctttcggtccgaacagaagtccatgctcccgaacgccgaactttcatggaccctgaagcgcttcgctctgccctggcaagcctccctagtcctcctcgctctgtcggaatcatccatactgctccacaaactgttctccccgccaaccctccaagcccaacacgacacctaccaccgacatctccaccctggatcctacagtctccagtgggagaggacgccattgtcgattccgaggacgacagcatttcttcctttcactcccacgacttcgacagcccctccggaccgctccgaagccagtctccctcccgctttcgcctccaccttcgttccccgtccacctccagcggcatcgagccctggagcccagcctcctacgactacggcagcgcccccgacaccgattgaacccacccaacgcacccatcaaaattctgacctcgcgctcgaaagttcaacctcaaccgaacctcccccaccccccatccgatcccccgacangacgccctccgcccccgtccttttcccagaaatcaactcacctcgtcgttttcccccccaacttcccgccacgcccgatctcgaacccgcccacactccaccccctctttccatcccgcaccaagatccgactgactcagcggaccccctcatgggctcccaccttttgcaccattcactgcctgcaccccccacccacccccttccatcttcacagctgttacccgcacctttaacgaacgaccccactgcgatcggcccggtgctcccctttgaagaactccacccacgcaggtaccctgaaaacaccgccactttcctcacgaggctccgttcactcccatcaaaccatcttccacaacccaccttgaattgtcttctctccgctgtctccgaccaaaccaaggtttccgaggagcacctctgggagtccctacagacaattctcccagacagccaactcagcaatgaagagaccaacactctcgggctttcaactgaacacctcactgcgttggcccacctttacaacttccaggcaaccgtttactccgatcgcggccccatcctcttcggcccctccgacaccatcaagaggatagacatcacccacaccaccggaccgccatcccacttttcacccggcaaaagactcctaggcagccaaccctccgctaagggccatccctccgacccactcatcagagccatgaagtctttcaaagtatccggcaactaccttcccttctctgaggcccacaaccatcccacctccatctcacacgccaagaacttgatttcaaacatgaagaatggtttcgacggcgtcctctccctcctcgacgtctccacgggccaacgaaccggacccncccccaaagaacggatcatccagatagaccactaccttgacaccaaccccggcaaaaccactcctgtggtgcatttcgctggcttcgctggctgtgggaagacatatccgatccaacagctcctcaaaaccaaactgttcaaagacttccgggtctcttgccctaccacagaactcagaaccgaatggaagacagcgatggaactccacggctcccagtcatggcgctttaacacttgggagtcttccattctcaagtcatccagaatcctggtcattgatgagatctacaaaatgccaagagggtacctcgacctttccatcctcgccgaccccgccctcgagctcgtcataattctcggcgatcctctncagggcgagtaccactcccaatcgaaagactcatccaaccaccgccttccctctgaaactctcaggctgctaccatacatcgacatgtactgctggtggagttaccgcattcctcaatgcatcgcccgactcttccaaattcacagcttcaatgcctggcaaggagttatcgggtccgtttccactccccatgatcaatcccccgtcctcaccaacagtcatgcctcatctcttaccttcaacagcctgggatatcgctcctgcacgatcagctctagccaaggcctcacattctgcgaccccgccataatcgtcctggacaactacaccaagtggctctcctcggctaacggcctcgtcgccctcactcgatccagatcaggcgtccaattcatgngcccctcttcctacgtcgggggaaccaacggctcttccgccatgttttccgacgccttcaacaacagcctcatcatcatggatcgctacttcccatccctgttcccgcaactcaagctcatcacctcccccctcacaactcgcggccccaaactcaacggggccacccccagcgcatcccccacccaccgttcgccaaacttccaccttcccccacacattccgctctcctatgatcgtgattttgttacggtgaacccaactctccccgaccaaggacccgaaacaagactcgacacccactttctcccaccgtctcggctccctctccatttcgatctcccaccggctatcaccccacccccggtttccacaagcgtcgacccgccacaagcgaaagctagccccgtctacccaggcgagttcttcgattctctggcggcgttcttcttaccagcacacgacccatcaacaagggaaatactccacaaagatcaatctagcaaccagttcccctggttcgaccgacccttcagcctgtcctgccagccctcaagtctgatttccgccaagcatgcacccaaccatgatccgacccttctaccggcctccatcaacaaacgcttgcgattcagacccagtgactcaccgcaccaaatcaccgcggacgacgtggtcctaggcctgcaactctttcactctctttgtcgcgcctactcacgtcaacccaacagcaccgttccattcaaccctgaacttttcgcagaatgcatctctctgaatgagtacgcacagctcagttccaaaacccaatccaccatagtggccaacgcttcacgctccgacccagactggcgacacaccaccgtcaagatcttcgcgaaagcccaacacaaagtcaacgacggctccatcttcggctcgtggaaagcctgccagaccctcgcactcatgcacgactacgtgattctggttcttggacccgtcaagaaataccagagaatcttcgacaacgctgaccggccacctaacatctactcacactgcggcaagacacccaaccaacttcgagattggtgccaggaacatctcactcattccacccccaaaatcgcaaacgactacaccgctttcgaccagtcccagcatggagaatccgtggtccttgaagccctcaaaatgaagagactgaacattccnagccatctgattcagctccacgtccacctcaagaccaacgtctccacccagttcggccccctcacatgcatgcgcctaaccggggaacccggaacttacgacgacaacactgactataacctcgcagtcatctactcccagtatgacgtcggttcctgccccatcatggtttctggcgacgactcactcatagaccacccccttcccactcgccacgactggccatccgttctcaaacgcctccacctccgcttcaaacttgaactcacctctcaccccctcttctgtggctactacgtcggtccagccggctgcatccgcaaccccctggcccttttctgcaagctcatgatcgccgtggacgacgacgccctcgacgaccgacgactcagctacctcaccgagttcaccaccggacacctccttggcgaatcactgtggcacctcctccctgaaacccatgttcagtatcagtcagcctgctttgacttcttctgcaggcggtgcccaagacacgagaaaatgctcctcgacgactccacacccgcactcagcctcctcgaacgaatcacttcttcgccgaggtggctcaccaaaaatgccatgtacctcctccctgccaagctacgactggccatcacctctctatctcaaacgcagtccttcccagaatccatcgaggtttcccacgctgagtctgaattgcttcactacgtccaatag

SEQ ID NO: 223 - protein, 415 aa, Citrus tristeza virus
VVRSQAIPPRKASLQENLLSYESRNYNFIKTERFVGPSEFGRAMAAAVIERCFKMEEMAKIRCDIISLTEANILKWLDKRTPCQIKAVHGELKLPFSVEEQISNFKLMVKRDAKVKLDDSSLSKHPAAQNIMFHKKFINAIFSPCFDEFKNRVLSSLNDNIVFFTEMTNAGLAEIIRRIIGDDDNLFVGEVDFSKFDKSQDLFIKEYERTLYSEFGFDTELLDVWMEGEYRARATTLDGQLSFSVDGQRRSGGSNTWIGNSLVTLGILSLYYDVSKFDLLLVSGDDSLIYSSEKISNFSSEICLETGFETKFMSPSVPYFCSKFVVQTGNKTCFVPDPYKLLVKLGAPQNKLTDVELFELFTSFKDMTQDFGDQVVLEKLKLLVEAKYGFASGTTMPALCAIHCVRSNFLSFERL

SEQ ID NO: 224 - protein, 446 aa, Beet yellows virus
TQVFESGADNVVIRDSAPVNKSTDHDPQRVSSIRSQAIPKRKPSLQENLYSYESRNYNFTVCERFSGPQEFGQAMAMVMLERSFDLEKVAKVRSDVIAITEKGVRTWMSKREPSQLRALSSDLQKPLNLEEEITTFKLMVKRDAKVKLDSSCLVKHPPAQNIMFHRKAVNAIFSPCFDEFKNRVITCTNSNIVFFTEMTNSTLASIAKEMLGSEHVYNVGEIDFSKFDKSQDAFIKSFERTLYSAFGFDEDLLDVWMQGEYTSNATTLDGQLSFSVDNQRKSGASNTWIGNSIETLGILSMFYYTNRFKALFVSGDDSLIFSESPIRNSADAMCTELGFETKFLTPSVPYFCSKFFVMTGHDVFFVPDPYKLLVKLGASKDEVDDEFLFEVFTSFRDLTKDLVDERVIELLTHLVHSKYGYESGDTYAALCAIHCIRSNFSSFKKL

SEQ ID NO: 225 - protein, 295 aa, Potato virus X
GTVRQSPDFDENKIMVFLKSQWVTKVEKLGLPKIKPGQTIAAFYQQTVMLFGTMARYMRWFRQAFQPKEVFINCETTPEDMSVWALNNWNFSRPSLANDYTAFDQSQDGAMLQFEVLKAKHHCIPEEIIQAYIDIKTNAQIFLGTLSIMRLTGEGPTFDANTECNIAYTHTKFDIPAGTAQVYAGDDSALDCVPEVKHSFHRLEDKLLLKSKPVITQQKKGSWPEFCGWLITPKGVMKDPIKLHVSLKLAEAKGELKKCQDSYEIDLSYAYDHKDSLHDLFDEKQCQAHTLTCRT

SEQ ID NO: 226 - protein, 70 aa, Potato virus A
GQLGVWNGSLKAELRPKEKVDLNKTRTFTAAPIETLLGGKVCVDDFNNMFYSLHLKAPWSVGMTKFYGTW

SEQ ID NO: 227 - protein, 236 aa, Potato virus Y
GLLGIWNGSLKAELRCKEKILANKTRTFTAAPLDTLLGGKVCVDDFNNQFYSKNIECCWTVGMTKFYGGWDKLLRRLPENWVYCDADGSQFDSSLTPYLINAVLTIRSTYMEDWDVGLQMLRNLYTEIVYTPISTPDGTIVKKFRGNNSGQPSTVVDNSLMVVLAMHYALIKECVEFEEIDSTCVFFVNGDDLLIAVNPEKESILDRMSQHFSDLGLNYDFSSRTRRKEELWFMSH

SEQ ID NO: 228 - protein, 236 aa, Pepper mottle virus
GKLGVWEWALKAELRSKEKIEANKTRTFTAAPIDTLLGGKVCVDDLNNQFYSKNIECCWTVGMTKFYGGWDKLLTALPAGWIYCDADGSQFDSSLTPYLINAVLTIRYAFMEDWDIGYKMLQNLYTEIIYTPISTPDGTIVKKFRGNNSGQPSTVVDNSLMVVLAMHYAFVREGIAFEEIDSICKFFVNGDDLLIAVNPERESLLDTLSNHFSDLGLNYDFSSRTRNKSELWFMSH

SEQ ID NO: 229 - protein, 235 aa, Bean yellow mosaic virus
GRMGVWNGSLKAELRPQEKVLANKTRSFTAAPIDTLLAGKVCVDDFNNKFYSLHLKIPSTVGITKFYGGWDRLLNSLPDGWVYCDADGSQFDSSLTPYLLNAVLEMRLRLMEEWDLGEQMLKNLYTEIVYTPILTPDGTVVKKFKGNNSGQPSTVVDNTLMVIMAVYYAAEKLGIKGNLEDTLVFFANGDDLLIAIKPECESYLDKFEGLFSELGLKYDFSSRTKNKGDLWFMSH

SEQ ID NO: 230 - protein, 188 aa, Wheat stripe mosaic virus
RVYRFQLKDIEKPFKDAIVDLGKAGQGILAWSKEAHVMFMLAFRVLNDLLLKSLKPWVVYDNSMSEEQFLDKVNAAMTVTPDCAVNSVIDATACDSGQNGFTQLIERQIYARLGASELLLDWYFSFREKYILQAEHVRAPMENVKTSGEPGTLLGNSILMAAILNALVRGSGPFVLVMKGDDGFKRQA

SEQ ID NO: 231 - protein, 401 aa, Rice yellow mottle virus
KQSLTSLILQAGRFNRTVCPPGLAQAVQSLQERYPKVPPRRCLRDEWRFDDIFDEVERILCETGEVNSASSPGVPLAGLANSNGEVRGLARDLVCLAVVERLNALASVDPRQHNWTPRELVEKGLCDPVRLFVKNEPHPRRKLLERRFRLISSVSLVDQLVERMLFGPQNNTEISTWWQWPSKPGMGLLTPEQIRLVWDDVFQKHQAHPAAEADISGFDWSVQDWELWSDLAIRINRGNFQGNLRRAAISRYYCFMNSVFQLSDGTLIQQELPGLMKSGSYCTSSTNSRIRCLMAELIGSPWCIAMGDDSVEGWIEGAQSKYAALGHTCKEYYPCKTRGRELLEFNFCSHLIRRGHAELTSWPKALFRFLSSKHEDFEDLWVELHTCGVWSRIERYLRGIG

SEQ ID NO: 232 - protein, 235 aa, Maize dwarf mosaic virus
GKLGIWNGSLKAEIRPIEKTEANKTRTFTAAPLETLLAGKVCVDDFNNQFYAHHLNGPWTVGITKFYGGWNRLLEKLPDGWIYCDADGSQLDSSLTPYLINAVLNIRLQFMEPWNIGEQMLKNLYTEIVFTPIATPDGSVIKKFKGNNSGQPSTVVGNTLMVIIAFNYTLLSCGVDLEKADDVCRMYANGDDLLLAVNPTHVDILNEFGKHFAALGLNFDFESRTRDKSELWFMS

SEQ ID NO: 233 - protein, 167 aa, Zucchini yellow mosaic virus
DFFKYNKPVTVNQLDHDKFLEAVDGVIRMMCDFEFNECRFITDPEEIYNSLNMKAAIGAQYRGKKKEYFEGLDDFDRERLLFQSCERLFNGYKGLWNGSLKAELRPLEKVRANKTRTFTAAPIDTLLGAKVCVDDFNNEFYSKNLKCPWTVGMTKFYGGWDRLMRSL

SEQ ID NO: 234 - protein, 236 aa, Watermelon mosaic virus
GEKGIWNGSLKAELRPIEKVQANKTRTFTAAPIDTLLGAKVCVDDFNNQFYSFNLKCPWTVGMTKFYGGWDKLMRSLPDGWTYCHADGSQFDSSLTPLLLNAVLSIRCCFMEDWWVGKEMLENLYAEIVYTPILAPDGTIFKKFRGNNSGQPSTVVDNTLMVVIAMYYSCCKQGWSEEDIEERLVFFANGDDIILAVRDEDVWLYDTLSASFAELGLNYNFDERTKKREELWFMSH

SEQ ID NO: 235 - protein, 235 aa, Sugarcane mosaic virus
GNLGIWNGSLKAEIRPIEKTTLNKTRTFTAAPLETLLGGKVCVDDFNNQFYSHHLQGPWTVGITKFYGGWNRLLEKLPDGWIYCDADGSQFDSSLTPYLINAVVKIRLQFMEEWDLGERMLQNLYTEIVYTPIATPDGSVIKKFKGNNSGQPSTVVDNTLMVILAFNYAMLSSGIREDEIDNCCKMFANGDDLLLAVHPDFEYILDGFQNHFSNLGLNFDFTSRTKEKSDLWFMS

SEQ ID NO: 236 - protein, 1616 aa, Tobacco mosaic virus
MAYTQTATTSALLDTVRGNNSLVNDLAKRRLYDTAVEEFNARDRRPKVNFSKVISEEQTLIATRAYPEFQITFYNTQNAVHSLAGGLRSLELEYLMMQIPYGSLTYDIGGNFASHLFKGRAYVHCCMPNLDVRDIMRHEGQKDSIELYLSRLERGGKTVPNFQKEAFDRYAEIPEDAVCHNTFQTMRHQPMQQSGRVYAIALHSIYDIPADEFGAALLRKNVHTCYAAFHFSENLLLEDSYVNLDEINACFSRDGDKLTFSFASESTLNYCHSYSNILKYVCKTYFPASNREVYMKEFLVTRVNTWFCKFSRIDTFLLYKGVAHKSVDSEQFYTAMEDAWHYKKTLAMCNSERILLEDSSSVNYWFPKMRDMVIVPLFDISLETSKRTRKEVLVSKDFVFTVLNHIRTYQAKALTYANVLSFVESIRSRVIINGVTARSEWDVDKSLLQSLSMTFYLHTKLAVLKDDLLISKFSLGSKTVCQHVWDEISLAFGNAFPSVKERLLNRKLIRVAGDALEIRVPDLYVTFHDRLVTEYKASVDMPALDIRKKMEETEVMYNALSELSVLRESDKFDVDVFSQMCQSLEVDPMTAAKVIVAVMSNESGLTLTFERPTEANVALALQDQEKASEGALVVTSREVEEPSMKGSMARGELQLAGLAGDHPESSYSKNEEIESLEQFHMATADSLIRKQMSSIVYTGPIKVQQMKNFIDSLVASLSAAVSNLVKILKDTAAIDLETRQKFGVLDVASRKWLIKPTAKSHAWGVVETHARKYHVALLEYDEQGVVTCDDWRRVAVSSESVVYSDMAKLRTLRRLLRNGEPHVSSAKVVLVDGVPGCGKTKEILSRVNFDEDLILVPGKQAAEMIRRRANSSGIIVATKDNVKTVDSFMMNFGKSTRCQFKRLFIDEGLMLHTGCVNFLVAMSLCEIAYVYGDTQQIPYINRVSGFPYPAHFAKLEVDEVETRRTTLRCPADVTHYLNRRYEGFVMSTSSVKKSVSQEMVGGAAVINPISKPLHGKILTFTQSDKEALLSRGYSDVHTVHEVQGETYSDVSLVRLTPTPVSIIAGDSPHVLVALSRHTCSLKYYTVVMDPLVSIIRDLEKLSSYLLDMYKVDAGTQXQLQIDSVFKGSNLFVAAPKTGDISDMQFYYDKCLPGNSTMMNNFDAVTMRLTDISLNVKDCILDMSKSVAAPKDQIKPLIPMVRTAAEMPRQTGLLENLVAMIKRNFNAPELSGIIDIENTASLVVDKFFDSYLLKEKRKPNKNVSLFSRESLNRWLEKQEQVTIGQLADFDFVDLPAVDQYRHMIKAQPKQKLDTSIQTEYPALQTIVYHSKKINAIFGPLFSELTRQLLDSVDSSRFLFFTRKTPAQIEDFFGDLDSHVPMDVLELDISKYDKSQNEFHCAVEYEIWRRLGFEDFLGEVWKQGHRKTTLKDYTAGIKTCIWYQRKSGDVTTFIGNTVIIAACLASMLPMEKIIKGAFCGDDSLLYFPKGCEFPDVQHSANLMWNFEAKLFKKQYGYFCGRYVIHHDRGCIVYYDPLKLISKLGAKHIKDWEHLEEFRRSLCDVAVSLNNCAYYTQLDDAVWEVHKTAPPGSFVYKSLVKYLSDKVLFRSLFIDGSSC

SEQ ID NO: 237 - protein, 1616 aa, Tomato mosaic virus
MAYTQTATSSALLETVRGNNTLVNDLAKRRLYDTAVDEFNARDRRPKVNFSKVVSEEQTLIATKAYPEFQITFYNTQNAVHSLAGGLRSLELEYLMMQIPYGSLTYDIGGNFASHLFKGRAYVHCCMPNLDVRDIMRHEGQKDSIELYLSRLERGNKHVPNFQKEAFDRYAEMPNEVVCHDTFQTCRHSQECYTGRVYAIALHSIYDIPADEFGAALLRKNVHVCYAAFHFSENLLLEDSHVNLDEINACFQRDGDRLTFSFASESTLNYSHSYSNILKYVCKTYFPASNREVYMKEFLVTRVNTWFCKFSRIDTFLLYKGVAHKGVDSEQFYKAMEDAWHYKKTLAMCNSERILLEDSSSVNYWFPKMRDMVIVPLFDISLETSKRTRKEVLVSKDFVYTVLNHIRTYQAKALTYSNVLSFVESIRSRVIINGVTARSEWDVDKSLLQSLSMTFFLHTKLAVLKDDLLISKFALGPKTVSQHVWDEISLAFGNAFPSIKERLINRKLIKITENALEIRVPDLYVTFHDRLVSEYKMSVDMPVLDIRKKMEETEEMYNALSELSVLKNSDKFDVDVFSQMCQSLEVDPMTAAKVIVAVMSNESGLTLTFEQPTEANVALALQDSEKASDGALVVTSRDVEEPSIKGSMARGELQLAGLSGDVPESSYTRSEEIESLEQFHMATASSLIHKQMCSIVYTGPLKVQQMKNFIDSLVASLSAAVSNLVKILKDTAAIDLETRQKFGVLDVASKRWLVKPSAKNHAWGVVETHARKYHVALLEHDEFGIITCDNWRRVAVSSESVVYSDMAKLRTLRRLLKDGEPHVSSAKVVLVDGVPGCGKTKEILSRVNFEEDLILVPGRQAAEMIRRRANASGIIVATKDNVRTVDSFLMNYGKGARCQFKRLFIDEGLMLHTGCVNFLVEMSLCDIAYVYGDTQQIPYINRVTGFPYPAHFAKLEVDEVETRRTTLRCPADVTHFLNQRYEGHVMCTSSEKKSVSQEMVSGAASINPVSKPLKGKILTFTQSDKEALLSRGYADVHTVHEVQGETYADVSLVRLTPTPVSIIARDSPHVLVSLSRHTKSLKYYTVVMDPLVSIIRDLERVSSYLLDMYKVDAGTQXQLQVDSVFKNFNLFVAAPKTGDISDMQFYYDKCLPGNSTLLNNYDAVTMKLTDISLNVKDCILDMSKSVAAPKDVKPTLIPMVRTAAEMPRQTGLLENLVAMIKRNFNSPELSGVVDIENTASLVVDKFFDSYLLKEKRKPNKNFSLFSRESLNRWIAKQEQVTIGQLADFDFVDLPAVDQYRHMIKAQPKQKLDLSIQTEYPALQTIVYHSKKINAIFGPLFSELTRQLLDSIDSSRFLFFTRKTPAQIEDFFGDLDSHVPMDVLELDVSKYDKSQNEFHCAVEYEIWRRLGLEDFLAEVWKQGHRKTTLKDYTAGIKTCLWYQRKSGDVTTFIGNTVIIASCLASMLPMEKLIKGAFCGDDSLLYFPKGCEYPDIQQAANLMWNFEAKLFKKQYGYFCGRYVIHHDRGCIVYYDPLKLISKLGAKHIKDWDHLEEFRRSLCDVAESLNNCAYYTQLDDAVGEVHKTAPPGSFVYKSLVKYLSDKVLFRSLFLDGSSC

SEQ ID NO: 238 - protein, 1601 aa, Turnip vein-clearing virus
MAQFQQTIDMQTLQAAAGRNSLVNDLASRRVYDNAVEELNARSRRPKVHFSKAVSTEQTLIATNAYPEFEISFTHTQSAVHSLAGGLRSLELEYLMMQVPFGSLTYDIGGNFSAHLFKGRDYVHCCMPNLDVRDIARHEGHKEAIYSYVNRLKRQQRPVPEYQRAAFNNYAENPHFVHCDKPFQQCELTTAYGTDTYAVALHSIYDIPVEEFGSALLRKNVKTCFAAFHFHENMLLDCDTVTLDEIGATFQKSGDNLSFFFHNESTLNYTHSFSNIIKYVCKTFFPASQRFVYHKEFLVTRVNTWYCKFTRVDTFTLFRGVYHNNVDCEEFYKAMDDAWHYKKTLAMLNAERTIFKDNAALNFWFPKVRDMVIVPLFDASITTGRMSRREIMVNKDFVYTVLNHIKTYQAKALTYANVLSFVESIRSRVIINGVTARSEWDTDKAILGPLAMTFFLITKLGHVQDEIILKKFQKFDRTTNELIWTSLCDALMGVIPSVKETLVRGGFVKVAEQALEIKVPELYCTFADRLVLQYKKAEEFQSCDLSKPLEESEKYYNALSELSVLENLDSFDLEAFKTLCQQKNVDPDMAAKVVVAIMKSELTLPFKKPTEEEISESLKPGEGSCAEHKEVLSLQNDAPFPCVKNLVEGSVPAYGMCPKGGGFDKLDVDIADFHLKSVDAVKKGTMMSAVYTGSIKVQQMKNYIDYLSASLAATVSNLCKVLRDVHGVDPESQEKSGVWDVRRGRWLLKPNAKSHAWGVAEDANHKLVIVLLNWDDGKPVCDETWFRVAVSSDSLIYSDMGKLKTLTSCSPNGEPPEPNAKVILVDGVPGCGKTKEIIEKVNFSEDLILVPGKEASKMIIRRANQAGVIRADKDNVRTVDSFLMHPSRRVFKRLFIDEGLMLHTGCVNFLLLLSQCDVAYVYGDTKQIPFICRVANFPYPAHFAKLVADEKEVRRVTLRCPADVTYFLNKKYDGAVMCTSAVERSVKAEVVRGKGALNPITLPLEGKILTFTQADKFELLEKGYKDVNTVHEVQGETYEKTAIVRLTSTPLEIISSASPHVLVALTRHTTCCKYYTVVLDPMVNVISEMEKLSNFLLDMYRVEAGVQYQLQIDAVFRDSNLFVQTPKSGDWRDMQFYYDALLPGNSTILNEFDAVTMNLRDISLNVKDCRIDFSKSVQLPKEQPIFLKPKIRTAAEMPRTAGLLENLVAMIKRNMNAPDLTGTIDIEDTASLVVEKFWDSYVDKEFSGTNEMTMTRESFSRWLSKQESSTVGQLADFNFVDLPAVDEYKHMIKSQPKQKLDLSIQDEYPALQTIVYHSKKINAIFGPMFSELTRMLLERIDSSKFLFYTRKTPAQIEDFFSDLDSTQAMEILELDISKYDKSQNEFHCAVEYKIWEKLGIDEWLAEVWKQGHRKTTLKDYTAGVKTCLWYQRKSGDVTTFIGNTIIIAACLSSMIPMDKVIKAAFCGDDSLIYIPKGLDLPDIQAGANLMWNFEAKLFRKKYGYFCGRYVIHHDRGAIVYYDPLKLISKLGCKHIRDVVHLEELRESLCDVASNLNNCAYFSQLDEAVAEVHKTAVGGSFAFCSIIKYLSDKRLFRDLFFV

SEQ ID NO: 239 - protein, 1612 aa, Pepper mild mottle virus
MAYTQQATNAALASTLRGNNPLVNDLANRRLYESAVEQCNAHDRRPKVNFLRSISEEQTLIATKAYPEFQITFYNTQNAVHSLAGGLRSLELEYLMMQIPYGSTTYDIGGNFAAHMFKGRDYVHCCMPNMDLRDVMRHNAQKDSIELYLSKLAQKKKVIPPYQKPCFDKYTDDPQSVVCSKPFQHCEGVSHCTDKVYAVALHSLYDIPADEFGAALLRRNVHVCYAAFHFSENLLLEDSYVSLDDIGAFFSREGDMLNFSFVAESTLNYTHSYSNVLKYVCKTYFPASSREVYMKEFLVTRVNTWFCKFSRLDTFVLYRGVYHRGVDKEQFYSAMEDAWHYKKTLAMMNSERILLEDSSSVNYWFPKMKDMVIVPLFDVSLQNEGKRLARKEVMVSKDFVYTVLNHIRTYQSKALTYANVLSFVESIRSRVIINGVTARSEWDVDKALLQSLSMTFFLQTKLAMLKDDLVVQKFQVHSKSLTEYVWDEITAAFHNCFPTIKERLINKKLITVSEKALEIKVPDLYVTFHDRLVKEYKSSVEMPVLDVKKSLEEAEVMYNALSEISILKDSDKFDVDVFSRMCNTLGVDPLVAAKVMVAVVSNESGLTLTFERPTEANVALALQPTITSKEEGSLKIVSSDVGESSIKEVVRKSEISMLGLTGNTVSDEFQRSTEIESLQQFHMVSTETIIRKQMHAMVYTGPLKVQQCKNYLDSLVASLSAAVSNLKKIIKDTAAIDLETKEKFGVYDVCLKKWLVKPLSKGHAWGVVMDSDYKCFVALLTYDGENIVCGETWRRVAVSSESLVYSDMGKIRAIRSVLKDGEPHISSAKVTLVDGVPGCGKTKEILSRVNFDEDLVLVPGKQAAEMIRRRANSSGLIVATKENVRTVDSFLMNYGRGPCQYKRLFLDEGLMLHPGCVNFLVGMSLCSEAFVYGDTQQIPYINRVATFPYPKHLSQLEVDAVETRRTTLRCPADITFFLNQKYEGQVMCTSSVTRSVSHEVIQGAAVMNPVSKPLKGKVITFTQSDKSLLLSRGYEDVHTVHEVQGETFEDVSLVRLTPTPVGIISKQSPHLLVSLSRHTRSIKYYTVVLDAVVSVLRDLECVSSYLLDMYKVDVSTQXQLQIESVYKGVNLFVAAPKTGDVSDMQYYYDKCLPGNSTILNEYDAVTMQIRENSLNVKDCVLDMSKSVPLPRESETTLKPVIRTAAEKPRKPGLLENLVAMIKRNFNSPELVGVVDIEDTASLVVDKFFDAYLIKEKKKPKNIPLLSRASLERWIEKQEKSTIGQLADFDFIDLPAVDQYRHMIKQQPKQRLDLSIQTEYPALQTIVYHSKKINALFGPVFSELTRQLLETIDSSRFMFYTRKTPTQIEEFFSDLDSNVPMDILELDISKYDKSQNEFHCAVEYEIWKRLGLDDFLAEVWKHGHRKTTLKDYTAGIKTCLWYQRKSGDVTTFIGNTIIIAACLSSMLPMERLIKGAFCGDDSILYFPKGTDFPDIQQGANLLWNFEAKLFRKRYGYFCGRYIIHHDRGCIVYYDPLKLISKLGAKHIKNREHLEEFRTSLCDVAGSLNNCAYYTHLNDAVGEVIKTAPLGSFVYRALVKYLCDKRLFQTLFLE

SEQ ID NO: 240 - protein, 775 aa, Turnip crinkle virus
MPLLHTLNTALAVGLLGARYYPEVQTFLGLPDYVGHMKNVVRSVFQGSGLVVVSSDTVGVRGTYSNRGQIGSSLGCILAVPDSGADIEIDLDRLVGTEEEATSCLVEAVGSTADVPRRRVRQKGRFAMHAVNAAKLHFCGVPKPTEANRLAVSKWLVQYCKERHVVDSHIRTIVNTALPRVFTPDAEDIQVVLDLHSVRAHDHRNALAEAGKVRKWWVNLAMHPMTGRSWSRAWRRLCRLPDDQAISFVRXGCLRELVGRETQISRGENPAMRVFPLANPPKVRRIFHICGMGNGLDFGVHNNSLNNLRRGLMERVFYVEDAQKQLKPAPQPIPGIFGKLSGIRRRLVRLAGNHTPVPREKYPSFYKGRRATIYQKALDSLHDRPVSRKDAELKTFVKAEKINFTAKKDPAPRVIQPRDPRYNIEVGKYLKPYEHHLYRAIDAMWGGPTVLKGYDVGELGNIMSNTWDKFRKTCAIGFDMKRFDQHVSVDALRWEHSVYNAGFNCPELAQLLTWQLTNKGVGRASDGFIKYQVDGCRMSGDVNTALGNCLLACSITKYLMKGIKCKLINNGDDCVLFFEADEVDRVRERLHHWIDFGFQCIAEEPQYELEKVEFCQMSPIFDGEGWVMVRNPRVSLSKDSYSTTQWANEKDAARWLAAIGECGLAIAGGVPVLQSYYSCLKRNFGPLAGDYKKKMQDVSFDSGFYRLSKNGMRGSKDVSQDARFSFYRGFGYTPDEQEALEEYYDNLELLCEWDPTGYKEELSDRWILNEFPTTL

SEQ ID NO: 241 - protein, 250 aa, Turnip crinkle virus
MPLLHTLNTALAVGLLGARYYPEVQTFLGLPDYVGHMKNVVRSVFQGSGLVVVSSDTVGVRGTYSNRGQIGSSLGCILAVPDSGADIEIDLDRLVGTEEEATSCLVEAVGSTADVPRRRVRQKGRFAMHAVNAAKLHFCGVPKPTEANRLAVSKWLVQYCKERHVVDSHIRTIVNTALPRVFTPDAEDIQVVLDLHSVRAHDHRNALAEAGKVRKWWVNLAMHPMTGRSWSRAWRRLCRLPDDQAISFVR

SEQ ID NO: 242 - protein, 818 aa, Tomato bushy stunt virus
METIKRMIWPKKEIFVGDFATGVNRTVPVNIFQLVCRVVLRYMRTGKIECDSDSMTKFIVELLKTDCAAKWEWFMKRRQRGDYIVPLSIASIPIIPLLSYATRVRAVSVKAFGNELSFNVRVPRPSVPKKGLLLRLAAGLALAPICALAVYATLPREKLSVFKLRTEARAHMEDEREATDCLVVEPARELKGKDGEDLLTGSRLTKVIASTGRPRRRPYAAKIAQVARAKVGYLKNSPENRLIYQRVMIEIMDKDCVRYVDRDVILPLAIGCCFVYPDGVEESAALWGSQESLGVKXGGLVRLPGVVTQINRDIPSDVLLPQEVLEVRTGPPNAKDRNIFMVAGCPSQARFLVHNHCLKNLKRGLVERVFCVERNGKLARTPQPTKGAFGRLSPFRKAVCEKVGVAHRLGYDGFLSYYSGAKLRTYTRAVESLHITPVSERDSHLTTFVKAEKISTSKGDPAPRVIQPRNPRYNVELGRYLRHMESKLMKAVDGVFGETTCIKGYTADEVGAIFRAKWDRFDKPVAIGLDASRFDQHCSVEALQYEHSFYRAMYPGNKLLGKLLEWQLHNKGKGYVPDGTITYRKEGCRMSGDINTSLGNYLLMCAMVHGYMRHLGINEFSLANCGDDCVLIVERRNLKQIQRTLPEYFLNLGYTMKVEQPVFQLEEVEFCQAHPVQFQGGWKMVRNVRTAMSKDVHCVNNIRDLATRRAWSNAQHHGGLALSAGIPVVETFYSRFKLYDVPRKHQRIDTVTNVHKWRGSGGSYVVTPESRASFWAAFGLTGDEQLALEDRLERWEMDLFGEEGVDAHEPSILDSAVA

SEQ ID NO: 243 - protein, 296 aa, Tomato bushy stunt virus
METIKRMIWPKKEIFVGDFATGVNRTVPVNIFQLVCRVVLRYMRTGKIECDSDSMTKFIVELLKTDCAAKWEWFMKRRQRGDYIVPLSIASIPIIPLLSYATRVRAVSVKAFGNELSFNVRVPRPSVPKKGLLLRLAAGLALAPICALAVYATLPREKLSVFKLRTEARAHMEDEREATDCLVVEPARELKGKDGEDLLTGSRLTKVIASTGRPRRRPYAAKIAQVARAKVGYLKNSPENRLIYQRVMIEIMDKDCVRYVDRDVILPLAIGCCFVYPDGVEESAALWGSQESLGVK

SEQ ID NO: 244 - protein, 2879 aa, Tomato spotted wilt orthotospovirus
MNIQKIQKLIENGTTLLLSIEDCVGSNHDLALDLHKRNSDEIPEDVIINNNAKNYETMRELIVKITADGEGLNKGMATVDVKKLGEMVSLFEQKYLETELARHDIFGELISRHLRIKPKQRSEVEIEHALREYLDDLNKKSCVNKLSDDEFERINKEYVATNATPDNYVIYKESKNSELCLIIYDWKISVDARTETKTMEKYYKNIWKSFKDIKVNGKPFLEDHPVFVSIVILKPIAGMPITVTSSRVLGKFEDSPSALHGERVKHARNAKLLNISYVGKIVGTTPTVVRNYYANTQKIKSEVRGILGDDFGSKDVFFSHWTSKYKERNPTEIAYSEDIERIINSLVTEEIPKEEIIHFLFGNFCFHIETMNDQHIADKFKGYQNSCINLKIEPKADLADLKDHLIQKQQIWESLYGKHLEKIMLRIREKKKKEKEIPDITTAFNQNATEYEEKYPNCFTNDLSETKTNFSMTWSPSFEKIELGSEVDYNNAIINKFRESFKSSSRIIYNSPYSSINNQTNKARDITNLVRLCLTELSCDTTKMEKQELEDEIDINTGSIKVERTKKSKEWSKQGSCLTRNKNEFCMKETGKENKTTYFKGLAVMNIGMSSKKRILKKEEIKERISKGLEYDTSERQADPNDDYSSIDMSSLTHRKKLIRHDNEDSLSWCERIKDSLFILHNGDIREEGKITSVYNNYAKNPECLYIQDSVLKAELETCKKINKLCNDLAIYHYSEDMMQFSKGLMVADRYMTKESFKILTTANTSMLLLAFKGDGMNTGGSGVPYIALHIVDEDMSDQFNICYTKEIYSYFRSGSNYIYIMRPQRLNQVRLLSLFKTPSKVPVCFAQFSKKANEMEKWLKNKDIEKVNVFSMTMTVKQILINIVFSSVMIGTVTKLSRMGIFDFMRYAGFLPLSDYSNIKEYIRDKFDPDITNVADIYFVNGIKKLLFRMEDLNLSTNAKPVVVDHENDIIGGITNLNIKCPITGSTLLTLEDLYNNVYLAIYMMPKSLHNHVHNLTSLLNVPAEWELKFRKELGFNIFEDIYPKKAMFDDKDLFSINGALNVKALSDYYLGNIDNVGLMRSEIENKEDFLSPCYKISTLKSSKKCSQSNIISTDEIIECLQNAKIQDIENWKGNNLAIIKGLIRTYNEERNRLVEFFEDNCVNSLYLVEKLKEIINSGLITAGKSVTSKFIRNNHPLTVETYLKTKLYYRNNVTVLKSKKVSEELYDLVKQFHNMMEIDLDSVMNLGKGTEGKKHTFLQMLEFVMSKAKNVTGSVDFLVSVFEKMQRTKTDREIYLMSMKVKMMLYFIEHTFKHVAQSDPSEAISISGDNKIRALSTLSLDTITSYNDILNKNSKKSRLAFLSADQSKWSASDLTYKYVLAIILNPILTTGEASLMIECILMYVKLKKVCIPTDIFLNLRKAQGTFGQNETAIGLLTKGLTTNTYPVSMNWLQGNLNYLSSVYHSCAMKAYHKTLECYKDCDFQTRWIVHSDDNATSLIASGEVDKMLTDFSSSSLPEMLFRSIEAHFKSFCITLNPKKSYASSSEVEFISERIVNGAIIPLYCRHLANCCTESSHISYFDDLMSLSIHVTMLLRKGCPNEVIPFAYGAVQVQALSIYSMLPGEVNDSIRIFKKLGVSLKSNEIPTNMGGWLTSPIEPLSILGPSSNDQIIYYNVIRDFLNKKSLEEVKDSVSSSSYLQMRFRELKEKYERGTLEEKDKKMIFLTNLFEKASVSEDSDVLTIGMKFQTMLTQIIKLPNFINENALNKMSSYKDFSKLYPNLKKNEDLYKSTKNLKIDEDAVLEEDELYEKIASSLEMESVHDIMIKNPETILIAPLNDRDFLLSQLFMYTSPSKRNQLSNQSTEKLALDRVLRSKARTFVDISSTVKMTYEENMEKKILEMLKFDLDSYCSFKTCVNLVIKDVNFSMLIPILDSAYPCESRKRDNYNFRWFQTEKWIPVVEGSPGLVVMHAVYGSNYIENLGLKNIPLTDDSINVLTSTFGTGLIIEDVKSLVKGKDSFETEAFSNSNECQRLVKACNYMIAAQNRLLAINTCFTRKSFPFYSKFNLGRGFISNTLALLSTIYSKEESYHFVSTASYKLDKTIRTVISAQQDMNLEKILDTAVYISDKLQSLFPTITREDIALILQNVCLDSKPIWQSLEDKMKRINNSTASGFTVSNVILSHNSELNTIQKQIVWMWNMGLCSHRTLDFVIRYIRRSDVRYVKTEEQDESRNYVSGTMYKIGIMTRSCYVQLIASDHDVAVSLRTPFEILNEREYLFDTYRESIEKLLQKFMFDKVNIIKSKQPQIVFLEPGDACIRMTTDNKMIVKVNATSRQIRLENVKLVVKIKYENVNSDVWDIIEGQKSLVLRLPEVGECFSDMYKTADSETETIKTIKNRLMTSLTFIEAFGNLSQQIKEIVYDDIRETMDEFLMNIRDTCLEGLENCKSVEEYDNYLDEDGFNDTVELFENLLRTHDNFEDEYSPLFSEIVDKAKQYTRDLEGFKEILLMLKYSLINDASGFKSYRATGMHAVELMAKKHIEIGEFNLLGMIQLIKACETCHNNDSILNLASLRNVLSRTYATFGRRIGLNHDLDLQNNLMEKSCDFKTLVLPDIKLSELSREILKENGFVISGENLKMDRSDEEFEGLASFNVLRLDEEEMYEGLIKEMKIKRKKKGFLFPANTLLLSELIKFLIGGIKGTSFDIETLLRNSFRPDIFSTDRLGRLSSSVPALRVYATVYMEYKNANCPLNEIADSLEGYLKLTKSKPKEHFLHGRVKKALIQLRDEQSRTKKLEVYKDIANFLSRHPLCLSEKTLYGRYTYSDINDYIMQTREIILSKISELDEVVETDEDNFLLSYLRGEEDAFDEDEIDEEEDTD

SEQ ID NO: 245 - protein, 2878 aa, Watermelon bud necrosis orthotospovirus
MNIQTINSFLDASGETTAYLQRIKDEIMLMSNVIEQGYSEGKGVIESGLSSIMSMNYILDKIEDMKSKYHQSSSSIDQREMETEIYLFLDKYKELELMRHDLFGVLAGRRLHFVPKHRSDVFMKDCLMSYIEFCSASVSISNKIDNLDSLKEKLIFQHLTPDNYTIYKETKGEKACLMIYDWKVSVDAVSEGKTSENYYTSVWKTFKDITIDEEPFLERHPIFITIVVLNPSGNMPIVATTCRVVQEFRNSPYKTFNDRKRAAEAAKLISVNSLGQLIGLGADCFRRFYSETQSFKNSLLSKVGKYMNRSSEVFFSHWSCEYRKTNLSNNQISQDIIDLINSLPNDVVGKEILVHFLFGNYLYFKETMSELHLKDRFEGYRSHCKMMRIRPLENEEKLKDYLDRNEHIFESLYETHLKKIKSDVLLRKSKEIEIESIERAFNINAEEYQKEYPGCFTNDLQETKTNFSICWSPMTEELKMNDLNYNNAIIQSFRDALSEQPKLIHHKSYGGAKVDTYFSTTLFNLVRACLVDLSTDTTGHSKATLEDVVDIKDGSIQVKRTEASQRWREIGNVKTRNGNEFTLSPQADTEARKNFFRGLNLMYVDMGKKKKIDIKNELKSKIQESMAQQKNENMDGPSGEYDVSKANIPHQTSLKGITHNKKLIRHDNPDVKYHCESMIESMYVLHGMDERKDKNSKINSVYNEYCSNPSSLFTKGNLIETEMTIAKNIHEVAKELSIYTYSEDMMQMAKGLMVADRFMKKTDFKILTCANTSMICLAFKGDGINTGKSGVPYITIHKVDKSIQPHFVSLYTKELIVSFKSENYFINIMRPQRLNQVRLLSLFKAPSKVPILFSQYSLLSTEIKKWLNQQSIDVFTCPENKIQYLQKILFSSVIIGTVTKLSRMGIFDFMRYARFLPLSDYSNIKEYIAEKFDPDITNVIDCFFVSGIKNLLLKMEGINLSNSIKPLTIDQENDMSGGISDLDIICPITGSTLKTIECLYNNVYLAIYMMPKSLHTHVHNLTTLLSVPAEWEIKFREKMGFMIGDEIKPKKEMFNDSGPFSINGVLNVKTLFDYYKKNITNVGACRSNIEEKEDFLSAPYKIKTLTSSKKCSKADIIKSTEIVAALKSSYGKQPDDIKGSDLYILKGVLKCFDEDRDSLTNFLEVEGLEESKYLHFFTNMMSGDNKILMKTNQDKFYYKSHPLTVETFMKVRYGYFKTTTVLKSKKVSEELYDLIKEFNKITEVDLEALEKLGRGLKGNRVTFIQLLEFILMKSRTNAGNTDFLVSIFEKMQRTKMDREIYLMSMKTKMMLYFIEHTYKHVAQSDPSEAISISGDYKIKNLASLSYDTITNYNTALQKNLECKMAFLSADQSKWSASDLTYKYILAVIMNPLLTTGEINLMCECIMMYVKLKRVCIPTDIFLNLKRGQTEYGSYGTALSVLTDNLETNTFPVSMNWLQGNLNYLSSVYHSCAMMGYEKAMKKMGNYDFTIRWMVHSDDNATSMVVRGDIKELLAEFNCTSLSELLFRSIQSHFKSYCITLNPKKSYASESEVEFISERIINGAVIPLYCRHLANCSTESSHNSYFGDLMSLSIHITMLLRKGCPNELIPFAYAAIQIQFLSIYSMLPGEENDISTIVKEIDFPLSKREIPICAGGWMYAPIELLSILGPSSNDQLIYYKIILDFFNLKDFSSLKKSVNSLGYIDLRINELFKRIKYQKITNADKKMICMVNLFKTSLMSEDCDSLNVGMKFQSMITQIIKLPSFVSEGSLLKNSSFQDFCKLFPNLKKNTDILNALKPVNLDERSLEELNESKFLSQIQLEELSRHMASHPESFLIAPMNDKDYILTNLYTYSSVSKRNQMLNQSTEKLALDRILRSKAKTFLDPNSKEMVSYKENMSMKMREIMSYAGNDFKIINTISSLMVRDMNFEMVVSLMENTVANASIPKANYNFRWFITEKVPSVIEGSPGLIVMSAVYGMDYLIELGLKKLPLTETSISILHDIFGNRKTFDDVKECIQNVKKQYKTEEFQNADVLKRYVLSINYMIQSQNKLLSINTCFSRKNFPFYSKYNLGKTFITNTLAIWSTIYSRLTNINFYTNLNFVIDRSSRLIISLQRDMNLEKLIDCCAYVSDRLQSLFPDMTVESIRQVLCRLNFNGVDLMKKMKSEIAEVKRAINNIKTSTHVTLSFRPQMIAMSKHAAWLYNFGYINEKEFKFVIDQIRQSEVHYIKTDEQDVRGYYVSGHTYKIGIKTQHNYGQLAMSNQDVSIHLHSPYEYKREDDGKIWDVHVRSVYKLLQKLLMDKQSVIKAFLNIRTELMPNQFCIHESSNKTLLILINDTTRPISLERIKFKGDIKYIPSSDFAWDMMSNQSKYRLRQAETGECYTELYKLIDNNDNLMNTILTNLKKSLEYGNEMENLIEQSIQGIDDADTIEYIQESVDQIHKLAIEGLETCQTSDEFENYLKRVDFQSTVDFHKDLLEQIVEEKYGSAERLDVAVEKLTKWTNSLSTFKDVCTMLKFSMVNDSKGIKTYKANGADFHSLSASEVMTSQGFDLFELLKLIKACEACHTSNSVLNLIAFKNIKNKTFIPGFKRHLPNTVHFDYEMKLNNEVMNKFYEYKTISLQDIKVSDRVKRVLETNGFSITGHNLKLEETNLELNPVEIIDDSSTYDQVAKQMRLTKKKSSYLIPANTLLLGELMKFLMLCIKGEEHDIMKLLRSHFAMQPVRENRLLCIQDAVMTCRISGYIQRHFLNDKKEIVLLGVADSLENFISLATPNYATQEPFKAEALIKKALAEVYDSGKYKILKNIRNYIVDDVEFLTEKCLYSNITNEEISNMIFNAVSKIDLELSNLKPKKRKKRLDLHDVFNGFLGSDATTSEQQ

SEQ ID NO: 246 - protein, 1844 aa, Turnip yellow mosaic virus
MAFQLALDALAPTTHRDPSLHPILESTVDSIRSSIQTYPWSIPKELLPLLNSYGIPTSGLGTSHHPHAAHKTIETFLLCTHWSFQATTPSSVMFMKPSKFNKLAQVNSNFRELKNYRLHPNDSTRYPFTSPDLPVFPTIFMHDALMYYHPSQIMDLFLRKPNLERLYASLVVPPEAHLSDQSFYPKLYTYTTTRHTLHYVPEGHEAGSYNQPSDAHSWLRINSIRLGNHHLSVTILESWGPVHSLLIQRGTPPPDPSLQAPPTLMXSDLFRSYQEPRLDVVSFRIPDAIELPQATFLQQPLRDRLVPRAVYNALFTYTRAVRTLRTSDPAAFVRMHSSKPDHDWVTSNAWDNLQTFALLNVPLRPNVVYHVLQSPIASLSLYLRQHWRRLTATAVPILSFLTLLQRFLPLPIPLAEVKSITAFRRELYRKKEPHHPLDVFHLQHRVRNYHSAISAVRPASPPHQKLPHALQKAALLLLRPISPLLTATPFFRSEQKSMLPNAELSWTLKRFALPWQASLVLLALSESSILLHKLFSPPTLQAQHDTYHRHLHPGSYSLQWERTPLSIPRTTAFLPFTPTTSTAPPDRSEASLPPAFASTFVPRPPPAASSPGAQPPTTTAAPPTPIEPTQRTHQNSDLALESSTSTEPPPPPIRSPDXTPSAPVLFPEINSPRRFPPQLPATPDLEPAHTPPPLSIPHQDPTDSADPLMGSHLLHHSLPAPPTHPLPSSQLLPAPLTNDPTAIGPVLPFEELHPRRYPENTATFLTRLRSLPSNHLPQPTLNCLLSAVSDQTKVSEEHLWESLQTILPDSQLSNEETNTLGLSTEHLTALAHLYNFQATVYSDRGPILFGPSDTIKRIDITHTTGPPSHFSPGKRLLGSQPSAKGHPSDPLIRAMKSFKVSGNYLPFSEAHNHPTSISHAKNLISNMKNGFDGVLSLLDVSTGQRTGPXPKERIIQIDHYLDTNPGKTTPVVHFAGFAGCGKTYPIQQLLKTKLFKDFRVSCPTTELRTEWKTAMELHGSQSWRFNTWESSILKSSRILVIDEIYKMPRGYLDLSILADPALELVIILGDPLQGEYHSQSKDSSNHRLPSETLRLLPYIDMYCWWSYRIPQCIARLFQIHSFNAWQGVIGSVSTPHDQSPVLTNSHASSLTFNSLGYRSCTISSSQGLTFCDPAIIVLDNYTKWLSSANGLVALTRSRSGVQFMXPSSYVGGTNGSSAMFSDAFNNSLIIMDRYFPSLFPQLKLITSPLTTRGPKLNGATPSASPTHRSPNFHLPPHIPLSYDRDFVTVNPTLPDQGPETRLDTHFLPPSRLPLHFDLPPAITPPPVSTSVDPPQAKASPVYPGEFFDSLAAFFLPAHDPSTREILHKDQSSNQFPWFDRPFSLSCQPSSLISAKHAPNHDPTLLPASINKRLRFRPSDSPHQITADDVVLGLQLFHSLCRAYSRQPNSTVPFNPELFAECISLNEYAQLSSKTQSTIVANASRSDPDWRHTTVKIFAKAQHKVNDGSIFGSWKACQTLALMHDYVILVLGPVKKYQRIFDNADRPPNIYSHCGKTPNQLRDWCQEHLTHSTPKIANDYTAFDQSQHGESVVLEALKMKRLNIPSHLIQLHVHLKTNVSTQFGPLTCMRLTGEPGTYDDNTDYNLAVIYSQYDVGSCPIMVSGDDSLIDHPLPTRHDWPSVLKRLHLRFKLELTSHPLFCGYYVGPAGCIRNPLALFCKLMIAVDDDALDDRRLSYLTEFTTGHLLGESLWHLLPETHVQYQSACFDFFCRRCPRHEKMLLDDSTPALSLLERITSSPRWLTKNAMYLLPAKLRLAITSLSQTQSFPESIEVSHAESELLHYVQ

SEQ ID NO: 247 - DNA, 3199 bp, Solanum lycopersicum
  source 1..3199: mol_type = genomic DNA
tcccaaaactcattatttaattttcttctttaacaaagttgacgagacaaaagcaaaatatatacaggaaaaatgggtgatccgttgattgaagaaattgatgttctggatgcacctttaccatattctgtagagacgatgcttgatagaatctgcaaggagcaggggcaaaaaccaccgtgtactggcattagaaggaggctgagctctattggtgaaaaagggtcattagaaatgctcaaaataatatcacgtcgtcctatcaagaagagtctctctgcttttcttgtttacatgattgatcgctacccggattgtctctcctcttcctctagccccttcaattgtctactcaaacgctcttcttcccctcgtctctttccatctccagagggtaaacgtttacaaggtgaaagttcttctaaatcaaagcttgagatgggcttattggcctgtgcaagccctcagaaagttgctcgccagttatcattttgcgaggagcctgaatctaactgtagaagaacctccccttatgtcagccaacagttgatgatcctcaatgaacttgaatttagaaaattgtttctggtactgagctacattggatgcaacaagttggaagatgttatatcccctcaaattgctgatgatattgtaagaaagaaaaatctttccatgactgattttgaatcagaaatttggaatgcttttggaaaagcatgttatgctgtgtcagatagatcaaagtacttagactggaattgcagaaagacacatatctactattgccacattaagcagaacggatactgttccttcaagggtccatacttgaacacattaaggactcacttacagagagccctgggagatgacaatgtactgattgtaaaatttgttgaagatacaagttgtgccaatataattctcgaggaaggcattcttgttggcttgagacgttaccgtttctttgtgtataaagatgataaagagaggaagaaaagtccagctatgatgaagacaaaaactgcttctttgaagtgctactttgttaggtttgagtccattggaacctgcaatgatggagaatcctatgtattttctaccaaaacaatcagtcaagcaaggtgtaaattcatgcatgtgcatatggtttctaatatggcaaaatatgcagccaggctttccttaattctatcaaagacgattaagcttcaaacagatcttgattctgtcaccattgaaagaattgaagatatactttgtcgggatgaaaatggttgtattattcaagatgaagacggcgaacctcgtatacatactgatggtactggtttcatatcagaagatttagctatgcattgtcccaaagatttttcaaaagcagaatatataaaagatgaaaattatgagaattttgttgatatcgtggaccttgatgacgtgaatgtagaaagaagagtgagtgtatctcgcaataggaaaccgcctttgttgatgcagtgccgtttgttcttcaatggttgtgctgtgaaggggacttttcttgtcaatagaaagattggatcacgaaaaattcatattagaccctcaatggtgaaggttgagatagacccaacaatttcaagtataccaacttttgactcattggagatagttgcaatcagtcatagaccaaataaggcatatctgtccaagaatttaatctctctgctgagctacggaggagtccataaagaatactttatggaacttttgggaagtgcgctggaagagacgaaacaagtatatttgaggaaacgtgcagctctaaaagttgctatcaactatagagaaatggatgatgaatgtctaacagcaaggatgatatcgtctgggatacctctcaatgaacctcatctccatgctcgcttgtctaggcttgcaaagattgaaagaactaagcttagaggaggaaagcttcctataagtgacagtttttatcttatgggaacagctgaccccactggtgtactggaaagcaatgaagtctgtgttattctagataatggccaagtatctgggcgtgttttggtctatagaaatcctggtcttcactttggagatgtacatgtgatgaaagcgcgatatgtggaagagcttgcagatgttgttggtgatgccaaatatggtatatttttttcaactaaaggcccgaggtcagctgctactgagattgcaaatggtgactttgatggtgatatgtattgggtttccataaaccgtaagttggtagattcttatacaacaagtagaccatggattcgcatgcattcaactcctaacgcagttagcaaaaaaccaagtgaattttcagctgatgaattggaatatgagctttttaggcaatttctggaagcaaagtctaaaggtgccaatatgtctctggcagctgatagctggctggcatttatggatcgtcttctgacgctgcgagatgataatgtggatgatatgcatagcttgaaaggcaagatgcttcacctgattgacatctactatgatgcattagatgcacctaaaagcgggaagaaggttagcatccctcattatctgaaggcaaacaagttcccccactatatggaaaaagggaactcctgcagctatcattcaacttctattctgggtcagatttatgatcatgtcgactcatatccagatgaagatttgtgtataacagaaatctctaaactgccttgctttgaagttgaaatccctcaaagatgcatgacattgtggagaggaagatatgaagagtacaaaaaggatatgacacgggccatgaactttgattgtgaactaagaatcacctcttgcaatgaagttataaagaagtacaagatgttgctatatggtgctgtggagtttgaacaaacagtaagaaagactgaagacattttcgacgaggcccttgcaatatatcatgtaacatatgataatgcaaggatcacatacagcatagagaaatgtggttttgcttggaaagtagctggttctgcgctttgcaggatccacgccatgtatcgcaaggaaaaagacttgcccattttgccatcggttttgcaggaaatactctagacgtattgtaacattgaagtgatcaataaatatctacttagcattctattctatgtgatgacgtccaaatttacttctcaaa

SEQ ID NO: 248 - DNA, 4902 bp, Arabidopsis thaliana
  source 1..4902: mol_type = genomic DNA
gttgttgctgtctcctctctcaatggctacctcctgcgactgaaacggtaaacctttattctctttagattcgtgtgtattcatcagtatatggtcatgttacaataatatattgcttattaactgatcaatctgttactgtcctgccctgcttactatagtagacagtttctgtggttttgtaatacttaggcatgtgttaactattattagaggacttacagtgagttaaggtgtcttcgtgtgtgtttctctcaaaatgatatatttgttactctgtacatatatatatatatgctcgtggaatcctgatgagaatttggttacagctttatcaatcctctaaatagttttcaacagtgcaaggttttgtgttcctctcttgaaaatatagtctctgaagtgttaacgagctctatatgactgtttgcagagttcaggcagcaatgtaaatgagctggagaatataagcaatgataggactgagtcaatagttcaagaacgtgaaggttctgacaactaagcaaactgcttcttcaatttggttcgataactgtagataaattgtgataaaatatcttttatttgatcaatcattacattattgtagagaatcctcagccaagagattggtagctagatagataaggttgacttggagtcaacttcttccttatagctttcttcatttaatatagtaaacgtttttaactcatttttttccagagaatctgtacccttggcgttcttgtactggttcatcgtagatgattctcgacgactagttgttatggctgaagcatttgtgtcgtttggacttgagaagctttgggatctcctgagtcgagaatcagagcgattgcagggaattgatgggcaacttgatggactaaagcgtcagctgagaagtttacagtcgttgttgaaagatgcagatgccaagaaacatggaagtgatagggtgaggaatttcttggaagatgtcaaagaccttgtttttgatgctgaggatataattgaatcctatgttctgaacaaacttagtggaaaaggaaaaggggtcaagaagcatgtgagacgacttgcttgcttcttgacggatcgccacaaggttgcttcagatatcgagggtatcactaagaggatctctgaagtgattggggaaatgcagagttttgggatacaacaaatcattgatggtggtcgttcgctgtctcttcaggaaagacaaagggtgcagagggagatccgacaaacgtatcctgacagttctgaaagcgatcttgtcggggtggagcagagtgttaaagaattggttggtcatttggtggagaatgatgttcatcaagtggtttctatagctgggatgggcggtattggtaaaaccactctggctagacaagtctttcatcatgacttagtccggcgtcactttgatggattcgcatgggtctgtgtttcccaacaatttacacagaaacatgtttggcagaggatcttgcaagaacttcagccacatgatggggatattttacagatggacgaatatgcacttcagcgtaaactctttcaattgttagaggccggtagatatttagttgtcctcgatgatgtatggaaaaaagaagactgggatgtaataaaagcagtgtttccacggaaaagaggtgagctcttatggtacatacatgaagcactttttcttcttaattcataaaagtgattgttaaaaaagaaatatatagaataattgccttttttattccctagcatgagaaacacaaatatttttgcaggttggaagatgctgcttacttctcgaaatgaaggtgttgggatacatgctgatccaacatgtttaacttttagagcaagcatccttaaccctgaagaaagttggaagctctgtgagagaatagtattccctaggagagatgaaactggtacatatcttattatataatgtttagtttctctaacttttaagaaaaatacatttacatatactaatttacatgtatatatttatattattttataaattttaattttccttaaccaaaaagtaatatttgtatacatattgctattttttccttactattagaacaactaactaaaaacgtatggtaatccatatgctaatttaggcatgtataaaaaaaaaagtcaatggtaatcttgattttgaccaaaaaataattaatttaattagcatgaacaatgagtgttgttaaggttcaaaaggacaatataattattaaacattaatttaattggataacaattaaaaaaattaactattaatcctagtacagtaagtcagtaattacgaatcttgaaaattggttttggtttttttcttcctattttttataggtttattcaaattagaaatatcgaattatctacttttatggtttattcatgattggtttgattaaaatttaacgtaataaaatcaactaaatttgaaagaaacatgtattgattaacccgtgattacacgattccttgtaataaagttcaaatagaatactaagaccaagaatctagtgtattattttaatttggcagctcacatgttgaaatgtattagcttgtgatattgtgcagaagtaaggcttgatgaagaaatggaagccatgggaaaggaaatggtcacacattgtggaggactaccattagctgttaaagcgttgggaggcttgttagctaataaacatactgttcctgagtggaaaagagtttttgacaatattggatctcaaatagtaggaggatcgtggttagatgacaacagtctcaattcggtttaccgaatattgtctctgagttatgaagatttgccaacgcatttaaagcattgcttccttaacctagcccatttccccgaagattccgagatatctacgtatagtttgttctattactgggctgcagaagggatttacgatggatcaaccatcgaagatagtggagaatactacctagaagagctagtgaggagaaatttggttattgcagacgacaactatttgagttggcaatctaaatattgtcaaatgcatgacatgatgagagaagtatgtttatctaaagccaaagaagagaacttcctacaaattatcatagaccctacttgcacctctaccatcaatgctcaatctcctagtagatctcgcagactcagcatacatagtggtaaagcctttcatatattgggacacaaaaacaagacaaaggtgagatctcttatagttccgagattcgaggaagactattggatacgatcagcttcagtcttccacaacttaacattgctcagggtgttggatctttcttgggtaaagtttgaaggagggaagttaccttgtagcattggagggctcatccacttgagatacttgagtttatacgaggctaaggtatctcatctaccttctactatgcggaacctaaagcttctgctctatttgaacttacgtgttgataccgaggaaccgattcacgtgccaaatgttttgaaagagatgatacagttgaggtacctttccctacctcttaaaatggatgataaaaccaagttggaattgggtgatctagtgaacctggagtacttgtatggtttctcaacgcaacacagtagtgtgacagacctcctccgtatgactaagctccggtatctcgctgtatctttgagcgaaaggtgcaattttgaaactctatcgtcatctctccgcgaattgcgaaacctcgagacgcttaatttccttttttcgctcgaaacatatatggttgattatatgggagagtttgttctggatcattttattcatctaaaacagttgggattggcagtacgtatgtcaaagattcctgatcaacatcaattccctccccaccttgtacacttatttctaatttattgcggcatggaagaggatccaatgccaattctagaaaagttgcttcatttgaagtcggttcgtttagcacgtaaggcattcctagggagcagaatggtgtgctcaaaaggcggatttcctcaattatgtgttatagaaatatctaaagaatcagagttggaagagtggatagtagaagaagggtcgatgccatgtcttcgtactttgactatagatgattgcaaaaagttgaaggaacttccagatggactcaagtacataacatccttaaaggaactgaagattgaaggaatgaagagggagtggaaggagaaactggtaccaggtggagaagattactacaaagtccaacacattcccgatgttcaatttatcaactgtgaccagtagcaggtaaaaaataaattgtatagtgttcactttgtttttttctgttgttgttggattcgtgtgaaagtcatgtggacagtctcaactattatacattgttctaacatcgatcatctttgaaataagatgcaggaaagaccaagaagcgagccaaattctcttatattgggagatatagacgctgcttcaacagagtcatctgctgatcaacaggtttttccgaagaatatctggtattgcttatgaagaatacagattctcaagtattaacgattatgtttccagtcttggagctctcgctttttcagtgcatcgttatgttgtgcggctcagaactatattatagaaacaatgcttatattgttgtttgtttttgatgtggatgcatggaacatgcttgagaactcttttacaaaatggagaaacgaaacttgtaaaatttggatattttatgtttgttgtaaaatttggatattttgtgtttgtgtaaaatttggatattatatgttttgctttctcgtttgtgatttaacacagttcgttttgtaagctttatttacagtttacaccatcaaatcttgtc

SEQ ID NO: 249 - DNA, 2931 bp, Arabidopsis thaliana
  source 1..2931: mol_type = genomic DNA
tttctcttcttttttttccctcacttctccaacaaactcgatttcccgatttcgtcgcctcttctcgtctctccgctctcctcgccgcgagtctgtttcgccgccgtctatctcccaattccggtacatcctaaaccatttccccttttaatccaacctgtgttgatttctaatcgcgattaatctcagttaggtttaattgcttgatctcagttgaaattagggcgtaatctcattactaaatgtagcaaaaatcgacaatatagtctcgtctctctgttatagcaatcaatttgtgagattctgaattttggcagaatcctaattctgaagtttggctaatatagaacctgtaattgtgttttttcatttatgagatgttttattaactttgttagtcacaaattgatttcatgtgtataatgttcattatttcgattttgttctcgtatgcgatattacgttcttggctgtgatatctgaagtaaagctgttgtaatctaagtttttcttctcttgattttaaacagtgaccgttgttgtttagtgaatcgatgatttacactgctatcgacaatttttacctatccgacgagcagctgaaggcttcaccttcgaggaaagatgggatagatgaaacaactgaaatctctcttagaatctatggatgtgatctcatccaagagggtggaatattgctcaaactgtatcctttttcttggtctaattattaagcaagactcaaatgttacgtagctgtgattttcttaacttagattgtttattttagaccacaggcagttatggctactgggcaggttctgtttcagcgattctattgcaagaagtctttggctaaatttgatgtcaaggtaaattattttgtttctttcttctagttttgtgtgtttatgaaagtatgataattctttaggagtgtatatactcctgcctatgaccataatgatttgatatgtagtttaatttttacagatagttgctgccagctgtgtatggcttgcatcaaaactggaagaaaaccctaaaaaagctagacaggtcatcatcgtattccacaggatggagtgtcgcagggagaacttgccattagaacatctggatatgtatgccaaggttagtttgcaattgcatttgtcatattgaatgttttttttcgtatattttgtttctactcatgggatagctttatttggaagtacttttatgggatctcatcttttttcctacttgttaaatatctgcagaagttctctgagttgaaagttgaattaagcagaactgagagacatatactgaaagagatgggttttgtttgtcatgttgaacatcctcacaagttcatatcaaactaccttgccacattagaaacacctccagaattgaggcaagaagcttggaatttggccaatgataggtaatctctattctcaaaatcctaatatggatattatttcatatgatttcctaatagttagctacacatcatagtgttgataggttttagagttgatgtttatcctgaagcttggcatttctcctgttctagtttgattttgagtatgtttgttatactttctcaatatctgataattcctttatgattttatcttaatctcatgatatgtctataatgcagtctgcgtacaaccctctgtgtaaggttcagaagtgaggttgtggcttgtggggtagtgtatgctgctgcccgtaggtttcaagtaccactccctgagaatccgccgtggtggaaagcatttgatgcagataaatctagtattgacgaagtgtgtagagttcttgctcatttatacagtcttccaaaggctcagtatatctctgtttgcaaggatgggaagccatttacattttctagcagatccgggaattctcaaggtcaatcagcgacaaaggtgaggtagatcgctttcttggttttgtaatttttgtgaaaacatgagattattgtccatattactgctattatagactcttaaagttgagtgcgtttcttacacagtagtaaacagagtttctaccaccacattgcatgttatatagtattgaaaaagggctgtctactttattatttcggcttgggaaaatctgcaatccaagtgcattttctatgtctgtaatcagagctaggtttgaagtgcttttaacactgttacaggatctgttgccgggagcaggcgaggctgttgatactaaatgtactgcaggatcagctaataacgacttgaaggatggaatggttactacaccacacgaaaaggctacagattccaagaaaagtggtaccgagtcaaactctcagccaattgtaggagactcaagctatgaaagaagtaaagtaggagatagagaaagagagagtgatagagagaaggaacgaggtagagagagggacaggggtaggtctcacagaggcagagattctgacagagacagtgatagggagagagacaaactcaaagatcgaagtcatcatcggtcaagagacagattgaaggattcaggtggacattcagataaatcaaggcatcattcttctcgggaccgtgactaccgcgactcatcgaaagaccgtcgtaggcaccattaagccaatcttcttgtcatctacatccccttgagcctacttgatgttaagacagtatagtgttgtattgtgttaagagtcaaaacccatgtgtacttaatcacatgctaagatcacgttggttcgacatataaaatcgagaaagtctgatatgtttctaatttggaattttgtgaaaagtgccttaaactttggaaaagtggttttttgacttttgacttgtgagttgttgtgaccgagcagagaggagaataatagtatccaaatctgacttgtggcacatgatggtaggcttaaagcacgttcaa

SEQ ID NO: 250 - DNA, 2681 bp, Brassica rapa
  source 1..2681: mol_type = genomic DNA
gagaacgattcgggaagtggcagttcaaatcttgtgttgcagctggtaatggcttttgcctcttcctcatcgagtattgttttaagcaaatgtgaattcgatgtcttttctttccatggtgcagacgtacgtaagaattttttgtcccacgtgcttatcgagctcaaatcaaagggcatagatgttttcattgacaacgatatccgccgatcgaaaagtataggaccttttctaattgacgcgatcaaggggagccgggtcgctatagtactgttatctgaagattatgcctcctcaacttggtgcttgaatgagcttgtggaaattatgaaatgtagaagggagttcggtcaaaccgttatgcccatcttttaccaggtcgacccatcggatgtaaagaaacaaacaggcgaattcggaaaggtgtttcagaaaatatgcaaggggaaaacagaggaaaagattcgtcgctggaaagaggcactcactgaagttgcgaacatcgctggtttccatagtagcaattggaagtctgaggccgaaatgatagagaaaattgcaaccaagatctccaacaaactaaatctgtcagtcccgtgttcgtattgcgacggcttagtaggaatagaaagtcacatgacagagatgcgaagcttgctttctctcgattgtgacgaagtgcggaaggttgggattctaggtatggcgggcatcggaaaaacaactatagctagatccctgtacaacaggcattgccaaaattttcagcgtttcgatggttgctgttttctttcaaacgagattgacgaattgaagcttcaaggtatcgatcagctccaacagaaactactgataaagttattggacgatgagacccttgaagtcggcgcctcgctcggagcacacaaagtactaaaggaccgcctgttaaataaaaagttgttcattgtgcttgataacgttgacaataaacaaatcagtctcctaataggggaggcgggtaagcagctgtatcgagatggcagccggattatcataacaacaagagacaaaaagttattggataaagtcgtagacggaacttacgtggttcctaggcttaacgggcgtgaagctctcgagcttttctgctcgaaagcatttggtaatcattatcccaccgaagagtttgtcgatctgtccaacgacttcgtatgctacgcaaaaggcttaccattggcgcttaagctcctaggaaaagggctgttaacacacgatattaattattggaagaaaaagttggaatttcttcaagtgaacccggacaaagagctccagaaggaactaaaatcatcgtacaaggctctggatgacgatcaaaaaagtgttttcttagacatcgcctgttttttccgcagcgagaaggcagattttgtctcttccatattgaaatcagacgatattgacgcgaaggatgtaatgcgagaacttgaggaaaaatgcctcgtgatgatctcgtatgaccggatagagatgcatgatctactgcacgctatgggtaaggaaattggcaaagagaagagtatcagaaaagccggagaaaggcgtcgcttaagcaattgtgagttgcttctcgacatactatctctgttattcgcaaactccgggtcagaatgcttgaagggtgattttaaagcgcttaatgagattaaggctatcaaaggcttccctgccgcattttcgatgctcggagacgatccctgtggggacggtgatttcctaaagtttcatggcagtcactgcagcactcagggagacaaccgagttgtcaccgatcatgaattccaagcgtctaaaatagtagggccatttccgattgctgtgacaaatctgttagacttgatgcggcttgatctccacaacaagctacctggtaaattcgaccccaaggagctgaaagatttatccttgagatggaatcatatcaaggacgttataccaccggaaattggcgagcttgaaaggctccgtcacctagatctgggatttaactcattcaaaggggagatccctaaggaattagccgcattgcccgagcttcgcgcgaaaaatctcgaagagctagacctggaaggtcgaataccagctgagtgtggctcgttacagaacttgcggcatcttgatgccggaaataaccacctcgtcgggaatactagagactgcattaggtttgatggtctattcaagggctttaaaatcaagagtctgaaaaacttaatattgagcggatgtattaaggcaaaagacttccatatcatatctgaagagattgtataccttcacctcgaaaagtttatctgcaatataccgttcgcgattgctcatatccacaaactaatatttctgaacttagatcataatcaattcttggggattcctgacgccttttataagcttaaattcctcaaggagatgtacatcgaaggtaaatccggcgtggagtcactacccacccacaaggttctggaagtctcggatgcagactttgcggtatggtaacgccctagacgatttctacctcctttgatctgttaaatctctcggactgacgaaagagaactttcttcaccactaatctatatttctccttaatcaaaaaaaaaaaaaaaaaaaaaaaaaaaaaaaaaaaaaaaaaaaaaaaa

SEQ ID NO: 251 - DNA, 5238 bp, Capsicum annuum
  source 1..5238: mol_type = genomic DNA
atggaaatcgtaactgctattttgagcccagtcgcagaacacttgatgatactgccagttgcgcgacagattggatatttgttttactataggcgcaacatcaggtctttggaaaatgaaaataagaagctggagggtatcagaagcggggtgcagcacagaaaggatgctgaatggagaaacttacaagtcatgccaccccatgtcgagaattggttaaaggatgttaatgaaactactgctgaggtggcggttttactacgacgtagagctgaggttgaaagaggttgcttctacggttggtgtccaaacttgaagtcacgtcactcgctgagcaggaaagctaagaaaattgaacaggctatgattggtcttcaagatgaaggcacacgttatgctccttcctcctgtccagcaccacttgcagttacagtgatacacagtgatgagtttgactctagaaaacagaaggaggaagaggtcatgacagctttgaaagatgaggggatcactattgttgggatatgtggtatgggtggtgttggtaaaacaacactggctgagaaagtaagagcaagggcaaaacaagaaaggttgtttgattatgttgttgtgctaactatcagtcaacaacaaccagacattaaaaaaatacagcgcgagatcgccgaaggagtcggtctatcattagagggggacgatttgttggagcgtggagatcggctgcgttcaaggttaatgcagaaggacagtcgcgtccttgtaattttggatgatgtttggaagaaggttgatctaaagagggttggaattcccagtggtagcgatcgcaactactggtgcaaagtgatattgacgacgcgtctccgagatgtttgtgacgatatggaggctaaaaagaaagtacatgttgaaatcttatgtgaaaatgaagcatggctcctttttaggcagaaagccggtaattcagctgatgatctctctcttcctgatatagcagaagccgttgccaaagaatgcaaggggctgccacttgcaattgttactgttgcaggagcactaaagggtaaaaccaagcgttcatgggaggatgcccttttagaattaaaaaaagcagcaccaagaaatattcgaggagtgcttgcagatgtgtatcaacctctgaagataagctataatcacttagggagtgatgaagccaaggatgcctttttgctttgttccttgtttgaggaagatagtaatatttggactgaagaattacttagatacggaatggggcttggcatcttttcggaactcgaaaatttagaatgtgcaagaaatagggtgtctaatctgttagaaacattgaaaaattgtttcttgttatcccaagttccaggcaaagattatgtcaaaatgcatgatgtggtccgggacatggctatacatattgcatctgagggtaaccatatttttttggtgagccacaatgtgaactcaaaagagttcccaagaaaagactcttacaagcaatacagtcatatgtcaattgttgcaaataaatttgatgcgcgtcccagaccaatatcttgcccacgattgaagcttctgatgttaaaactccgtttcgaagagggtttcaaattacaggatgatttttttgatggaatgagtgaactcagtgtcataaaactgagtggatatgatcgaaactccattctgccctttccatcatccattcagaggttgtcaaatctgagcacgctttggctgagtaatctaaggttggatgacgtgtccattattggggaacttgtcactttagaaattctcagcatcagaggttctgacttacaggagcttccagtggagatcggaaacttggccaatctaactatgttagagtattggaatactggttacagaaaccgtatgaggatttcaccaggggtcttatcaagactagttcgattggaggaactacatatggtgggagtagaagattgtagttactccaccttgagggagctggaatcgttatcgagattgactgcactgacattagatggatgttccaaagatgtgatttacagtaacttgggcctttcctccaagttgacacggtacgctcttaaaatgggtagacactacacgtttacttcattcatgcaaacttacaacaaggctatctatctagacgtcaccaagggcaccccattgggtgattggatccgcctcctgttgaggaatagcgaatgtgtaagttcaagcggaaaggggtccaagaatgtagtgttcgagttgcagaatgtgaaagatctcaggctgtctttttgtgattcattgaatatccactgtcagaataatattccattccccaaacttgaaaggctgaaagtaaatgggtgtgatcatctacggcatcttttttgtgtgtccttggcttgccctgatgaggggacctctcgaaggacacacatcagacctgacgtaatcaagttccccaatttatattacttggaactgggatttctgaaatgcttcacacactttttcagtgacaccgttgagggcattgagttccctctgttacggaaaatgcatttctggagtttacaaaagttccaaaatttctggcctagagtcaacaatgctatcaccgactcaaatcctctttttaatgaaaaggtttcttgtcccaacctggaattgctacgactctgtgaggccaacagcttaactgctctatgctctcaccaacttccaactgcctacttcagcaaacttgtaaccttgaatgtacttaggtgtggaaaactgagaaacttgatgtctccatcagtggccagaggtcttctgaatctccgaatattactattagaagactgtgaatcaatggaagaagtgatcacagaagaggaacaacaaggagatgaaatcatgtgtaatgaacccttatttccccaattggaagagctgggacttgaaaatctgccaaatctgaggcatttcattttgacaaagcaagctcttgaatttccattcctcagagaagtgcagattcgtaactgccctgaaacgaagatatttgtccaacagagatctgtcagtacatcaagtctcaaaagtgtgaacaatgatgatgagttgaaagttgttgatctcaacaaagcgatgtttaattctaaggtttcttgtcccaacctggaagtgctacgactctataaggctaacagcataagtgctctatgctctcaccaacttccaactgcctacttcagcaaacttaaggaactaggagtagggaattgtggaaaattgagacacttgatgtctccatcagtggccagaggtcttctgaatctccgaaaactatggataggagaatgccaatcaatggaagaagtgatcacagaagaggaacaacaaggagatgaaatcatgtgtaatgaacccttatttccccaattggaagagctgggacttgaaaatctgccaaatctgaggcatttcattttgacaaagcaagctcttgaatttccattcctcagagaagtgctgattcgtaactgccctgaaacgaagatatttgtccaacagagatctgtcagtacatcaagtctcaaaagtgtgaacaatgatgatgagttgaaagttgttgatctcaacaaagcgatgtttaattctaaggtttcttgtcccaacctggaagtgctactactctataaggctaacagcataagtgctctatgctctcaccaacttccaactgcctacttcagcaaacttaaggaactaggagtatggaattgtggaaaattgagacacttgatgtctccatcagtggccagaggtcttctgaatctccgaaaactatggatacgagaatgccaatcaatggaagaagtgatcacagaagaggaacaacaaggagatgaaatcatgtgtaatgaacccttatttccccaattggaagagctgggacttgaaaatctgccaaatctgaggcatttcattttgacaaagcaagctcttgaatttccattcctcagagaagtgctgattcgtaactgccctgaaacgaagatatttgtccaacagagatctgtcagtacatcaagtctcaaaagtgtgaacaatgatgatgagttgaaagttgttgatctcaacaaagcgatgtttaattctaaggtttcttgtcccaacctggaagtgctactactctataaggctaacagcataagtgctctatgctctcaccaacttccaactgcctacttcagcaaacttaaggaactaggagtatggaattgtggaaaattgagacacttgatgtctccatcagtggccagaggtcttctgaatctccgaaaactatggatacgagaatgccaatcaatggaagaagtgatcacagaagaggaacaacaaggagatgaaatcatgtgtaatgaacccttatttccccaattggaagagctgggacttgaaaatctgccaaatctgaggcatttcattttgacaaagcaagctcttgaatttccattcctcagagaagtgctgattcgtaactgccctgaaacgaagatatttgtccaacagagatctgtcagtacatcaagtctcaaaagtgtgaacaatgatgatgagttgaaagttgttgatctcaacaaagcgatgtttaattctaaggtttcttgtcccaacctggaaaagctatatatctattcggacataactgctctatactctcaccaacttccaactacctacttcagcaaacttgggacattgaaagtagaaaattgtggaaaattgagacacttgatatctccatcagtggccagaggtcttctgaatctccgaaaactacggataggagaatgccaatcaatggaagaagtgatcacagaagaggaacaacaaggagatgaaatcatgtgtaatgaacccttatttccccaattggaaaagctgaaacttgaaaatctgccaaagctgaggcatttcattttgacgaagcaagctcttgaatttccattcctcaaattagtggtgattcgtaaatgccctgaaatgaagatatttgtccaacatggatatgtgagtacaccaagtcttgaaattgtgaacgatgatgatgaggtaaaagtagatgatttgaacgaatggatacatcagaggttcaattctaaggaagaagatggaagtgaatctgaatcttctcagggagaagattggaatcgaatctga

SEQ ID NO: 252 - DNA, 682 bp, Arabidopsis thaliana
  source 1..682: mol_type = genomic DNA
tacatgtatatatattaatgttatgctattttcgttatgtaaccaaacaaaagagcttttgagttttggtcgtacaaaaaaaaagaaagggaaaatgaagataggacctgtagggaagcatgatgctagaagcactacaattgtaaactgggacgaaggatctcacgatggcttcatctctcagatttttctatctcatggcgtcgctggaattatgtctatccaattccagttcgtgatggacggaaaactcgttttatccgatcgtcacggtccattttccggcaacatgtttgacgttatagagctcaactatccgcatgagtacataactggaatcagtggagagtattacaagtatgaagccaacaatcctcacatgaggtctctcaaattcaataccaacactagcgagtacggtccttttggcacctccggttcgagcaacgacaaatttgcttttaaactcgggaaatctcctcagttcggcggtttccatgggacttatgatgcctcgggactacagtacattggtgtttatctccgcccaaaaacagttctacccaaaatagatacgggcaatgcagaggaaacagagtcaaaaattgtactgggctgaaagtgtttgtatacgactctattctgctgattgtacattcttaattatgaaaattcttctatg

SEQ ID NO: 253 - DNA, 3741 bp, Solanum peruvianum
  source 1..3741: mol_type = genomic DNA
atggctgaaaatgaaattgaggaaatgttagagcacctgagaaggatcaagagtggaggtgatctggattggctcgacatattgcgaattgaggaacttgaaatggtgctaagagtttttagaacctttacaaagtataatgatgttcttttgcctgattccttagtcgaactcacaaagagggccaaattgattggggaaatacttcaccggttgtttggtaggattccacataaatgtaaaactaaccttaatctagaaaggctagaatcacatttgttggaattctttcaaggtaatacggcaagtttaagtcacaattatgagttgaataattttgatctgtcgaaatatatggattgtctggaaaattttctaaatgatgtactgatgatgttcttgcaaaaggataggttcttccattccagagaacaacttgcaaaacatcgatcaataaaggaactgaaaattgttcaaaagaaaataagatttttgaaatacatatatgccccagagataaatggttatgtcgactatgagaagcaggaatgtttggagaatcgaattcagttcatgactaacactgtgggacaatattgtttggcagtattagattatgtcactgagggtaaacttaatgaagaaaatgacaactttagtaaacctccttacctattatcattgattgtgttagtggagctggaaatgaagaagatttttcatggtgaagtaaaggcttcaaagtttactcaatcaaaaactttcaaggacaagaaattaccaaaaggattttcacatcatctccacaatctgttgatgtatctcagaaacaaaaagctcgagaattttcctaataatatcgctgctcaaaatattgatgtggcaatagagttcttgttggttttccttgatgctgatgtgtcaaatcatgttattaatggtaactggttgaaagaggtcttgttaaaagttggagctatagcgggtgatattctatatgtaattcaaaagcttcttcctagatcaataaacaaagatgaaactagcaacataagtctttgctcaatacagatattggagaagactaaagatctgaaggcacaagttgagacgtactacaaatccttaaaatttactccatctcagttccccacctttggtggattgagctttctgaattctcttttaaggaaactgaatgagatgtcgacatctaagtccggattaggtttcctgatgaaacctcttttagggaatttggagaaagagctatcatctcttacatccattttagagaaggagctctcatccattttccgtgatgtcgtgcaccatgaacataacattcctaaagatcttcagaggcgtaccatcaatttgtcatatgaggctgaggttgctattgattctattcttgctcagtataatgcttttttgcatattttttgctcacttcctacaattgtaaaagagatcaagcaaattaatgcagaggtgactgagatgtggtcagcggacattcctcttaatcctcactatgtggctgctccattaaaacatctgccggatcgacatagcaatcttgtaactgatgaggaggtagtgggttttgagaataaagcagaagaactaattgattatctgattagaggtacaaatgagctagacgttgtcccaattgtaggcatgggaggacaagggaaaacgacaattgctagaaagttgtacaataatgacattattgtttctcgctttgatgttcgagcatggtgcatcatttctcaaacgtataatcggagagagttattacaagatattttcagtcaagttacaggttccgacgacaatggagctacggttgatgttcttgccgacatgttgaggagaaaattaatgggaaagagatatctcattgtattggatgatatgtgggattgtatggtatgggatgacttaaggctttcttttccagatgatggaattagaagcagaatagtcgtaacaactcgacttgaagaagtgggtaagcaagtcaagtaccatactgatccttattctcttccattcctcacaacagaagagagttgccaattgttgcagaaaaaagtgtttcaaaaggaagattgcccgcctgaactacaagatgtgagtcaagcagtagcagaaaaatgcaaaggactgcccctagtggttgtcttggtagctggaataatcaaaaaaaggaaaatggaagaatcttggtggaatgaggtgaaagatgctttatttgactatcttgacagtgagttcgaagaatacagtctggcaactatgcagttgagttttgataacttaccccactgtttaaagccttgtcttctttatatgggaatgttttcggaggacgcaagaattccagcatctacattgataagtttatggattgctgaaggattcgtggagaacactgaatctgggagattaatggaagaggaagctgaaggttacttgatggatctcattagcagtaacttggtaatgctttcaaagagaacttataagggtagagtcaaatactgtcaggttcatgatgttgtgcatcacttttgcttggaaaagagtagagaagcaaagtttatgcttgcagtgaagggtcaatatatccattttcaaccttcggattggaagggaactcgagtgagcttcagttttagtgaagagctttccaagtttgcatctctggtctccaaaacacagaagcctttccatcaacacttgaggtcattgataacgaccaatcgagcaaaatctattaatgatattttctcctgtcagattagtgaattgcgacttcttaaagtcttggatttgagttcttatattgtggagtttttgtcgttagctacattcaaaccactaaatcagctgaagtacctcgcagttcaggcttttgaattctattttgatccaggatcacatcttccccatatagaaactttcattgtaatgaatcttccttattatgatatattgttaccagtgtctttttgggaaatgaaaaaattaaggcatgctcattttggtaaggctgaatttgacaagcaggggctctctgaaggatcctctaaattggaaaatttgaggatattaaagaatattgttggatttgatagggtggatgtgttatcaaggaggtgtcctaatcttcaacaacttcaaatcacatattttgggaataatgaagagcctttttgtcccaaattggagaatcttacccagcttcaacaacttcaactttcctttgcgcgtccccgcactctatccgggttacagttgccttcaaatttaaataagttggtacttgaaggaattcatataggatgtgttattcccttcattgcgggactaccaagcctggaatatctccagttacatgatgtgtgttttcctcaatcagaagagtggtgccttggagatatcacgttccataaacttaagttgttgaaactggtaaagttaaatatatcaaggtgggatgtctcagaggaatcatttccgttgcttgaaacactcgttataaagaagtgcattgacctagaggagattccacttagctttgctgatattccaacattggaacagattaaattgattgggtcctggaaagtatctctggaggattcagctgtgagaatgaaggaagaaatcaaagacactgaaggatgtgatcgtttacacctcgtcaaacaacgctcagattga

SEQ ID NO: 254 - DNA, 7158 bp, Nicotiana glutinosa
  source 1..7158: mol_type = genomic DNA
attttttcacatacagtttcttactcttttcagagaattaacgttgagtccatggcatcttcttcttcttcttctagatggagctatgatgttttcttaagttttagaggcgaagatactcgaaaaacgtttacaagtcacttatacgaagtcttgaatgataagggaataaaaacctttcaagatgataaaaggctagagtacggcgcaaccatcccaggtgaactctgtaaagctatagaagagtctcaatttgccattgttgttttctcagagaattatgcaacatcaaggtggtgtttgaatgaactagtgaagatcatggaatgcaaaactcgatttaagcaaactgttataccgatattctatgatgtggatccatcacatgttcggaaccaaaaggagagctttgcaaaagcctttgaagaacatgaaacaaagtataaggatgatgttgagggaatacaaagatggaggattgctttaaatgaagcggccaatctcaaaggctcctgtgataatcgtgacaagtgagttaaaaacatataagctgaatactttgcattcaaatgagttaaacataatcttaaataaatttttcaattttttggaataaattgatagttgattatatatgtttctatcagttaattacaaactcaataacattattacgtagataaaatttttattagttcttcaaagagtttgatttatgtgcacactctttgtatatatcacaatctttttacttttgtaggactgatgcagactgtattcgacagattgttgaccaaatctcatccaaattatgcaagatttctttatcttatttgcaaaacattgttggaatagatactcatttagagaaaatagaatccttactagagataggaatcaatggtgttcggattatggggatctggggaatggggggagtcggtaaaacaacaatagcaagagctatatttgatactcttttaggaagaatggatagttcctatcaatttgatggtgcttgtttccttaaggatattaaagaaaacaaacgtggaatgcattctttgcaaaatgcccttctctctgaacttttaagggaaaaagctaattacaataatgaggaggatggaaagcaccaaatggctagtagacttcgttcgaagaaggtcctaattgtgcttgatgatatagataataaagatcattatttggagtatttagcaggtgatcttgattggtttggtaatggtagtagaattattataacaactagagacaagcatttgatagagaagaatgatataatatatgaggtgactgcactacccgatcatgaatccattcaattgttcaaacaacatgctttcggaaaagaagttccaaatgagaattttgagaagctttcattagaggtagtaaattatgctaaaggccttcctttagccctcaaagtgtggggttctttgctgcataacctacgattaactgaatggaaaagtgctatagagcacatgaaaaataactcttattctggaattattgataagctcaaaataagttatgatggattagagcccaaacaacaagagatgtttttagatatagcatgcttcttgcgaggggaagaaaaagattacatcctacaaatccttgagagttgtcatattggagctgaatacgggttacgtattttaattgacaaatctcttgtgttcatctctgaatataatcaggttcaaatgcatgacttaatacaggatatgggtaaatatatagtgaattttcaaaaagatcccggagaacgtagcagattatggctcgccaaggaagtcgaagaagtgatgagcaacaacacagtaagtaagctaaataatgcaataatatttaatttctaattttatattctaaagacacatagggcagtcaattccagttatttgttcctcttgcttcatagtcttgacggtacatcattttagttgtttactttagttagtaggagatataaaagtaatattaattacctcattagtaaaaaaaaacattaattgcctaatttgtttagtagccgctttaatttacgttccctaattcgttttttcttatattttttagggatggattagtctagtagccacttaatctgtttgatccaatgtctttctttggattaacttgaaaattttatgacattatatataataactcaatcattcattcactttaccattattattttttatataaagttacaatttattggtactgtttcagttacaattactttccaacatggaaaacttataaactggactccaataaacttataagaaaaatgtaataatagaaaataaaattatataattaattacaaaaaagtatttttctgaagtaacatcagtatttcttaaaaagaatccaattaacattgtatcttaaactttggtattgtaaggcgtgagaaagtagtggccttatttcaatttgacgtgaagaatagaatgccttttaacgacataagggaagggggcaagaataagtttctattcagccgggctcgaagcagaaggtagaacgtaatatcttttgttggttcagctcatcaagctattacaaaagagtccgctcatattaacaaacggagtttatacgacatttgaaattatactttgtagactaatgatcttcttgttaccaggggaccatggcaatggaagcaatttgggtttcttcttattctagtactctacgctttagcaatcaggccgtgaaaaatatgaaaaggcttagggtatttaacatggggaggtcgtcgacacattatgccatcgattatctgcccaacaacttgcgttgttttgtttgcactaactatccttgggagtcatttccatctacatttgaactcaaaatgcttgttcacctccaactccgacacaattctctgcgtcatttatggacagaaacaaaggtacaatagcttgaattctattttgttgtcatttatttttctctctaactatctttgtcctttaatttggtgataatgaacaaatattattgttttttgttatgaaacaataaaagaagaagaacaatattgcagagaaagagggagatggaattcttattgaattttggggcgatttacaatggggtaagacccctctatttacaggggaaaaataacttagcctcaaaataaagctctttaaaagatagacattcactctaaatagaattctattataacacttttggcgtacttccttttttggctagaattatgatacatgtctttaaatgaacagaagttgcttttgtaatttatcaggacttatgttgaaacttatgaaaattgttattgtttatgttgtctaatactaaatataaaatacaataatattttatcgtaattttttaaaaatttgtcaaataatgcaaatgaaaaattaaattttttggtcctttaaaaatttgagaatgaaaaagtacgagttatacttcctaaaagtttgatagtgaataatatgtaaaatttaaagaatgactaatattggactaatactttaaaacaaataacttaatatacaaattatagcgagacattttcattcgttgtactgaatgcaagaaagaaaggaaaaaaaaactcatttataatatagtttgtcttctactattttaccttattgcttcaaatttgtattttatcgattttgctatatcttatgatttttttcacggtcaatattcttcttacaagaataaattttatatacctcaagtgttttgtcaatttgataaataatttttcttatatgatgaacttgtaaaataatagaattggattcttttgctaattagttaattcaacgacttaattatttattctcaacattaaaggaaataatttagtttttattaattcaaactcttagtatttgctcattctaattttcagtccaataagaattcaattttcaaatagtaagaaaagtcatatattttgaattttatgttttccgaagcattgtttgtttgtttaactctacgggagttttctaactcacattttgtataataaaattttttgagtagtagttcagtacaactctaatattaatgggctttaaataaggaaatatatattacgtaaaaatttaaatcattttaaagttctttcctaccaagtaaataagggaaaatttaataacaaaaatttagttgattttaaaatcctaaatattagaaaattaacttaaaatataatttcgtctagtgtaaaatttatttttaaagggtaaaaaagacgaacgacattaagagcctttgtaattttaatatagtataaatataaataatttacctttattcagtttcttaacaagtaattttccatatataaaaaataaatttctatattcacacaaaaataatgtgttggccctcgtaattcaaatactatcattcatttcttgtcgagggagtagtaaatacttttaggaaagttagcaataagtaatcaagaaatcaagaaaacagaggtcatttgatgcccacaaatacaaatgaaaaaacaaaacaaatgttacgaaacaataaaagaacaagaatagcctcaaagtaaaactctctgatagacatttactctaaatagaattctatttataacaatcaaaaagtttctacatttatagatagctccactagccaaatattttattattggaatcagcaaaataggttgtttctttttttattctcattctgtctgtgttctaaacagcatttgccgtctctacggaggatagatctcagctggtctaaaagattgacgcgaacaccagatttcacggggatgccaaatttggagtatgtgaatttgtatcaatgtagtaatcttgaagaagttcaccattccctgggatgttgcagcaaagtcattggtttatatttgaatgattgtaaaagccttaagaggtttccatgtgttaacgtggaatctcttgaatatctgggtctaagaagttgcgatagtttagagaaattgccagaaatctacgggagaatgaagccggagatacagattcacatgcaaggctctgggataagggaactaccatcatctatttttcagtacaaaactcatgttaccaagctattgttgtggaatatgaaaaaccttgtagctcttccaagcagcatatgtaggttgaaaagtttggttagtctgagtgtgtcgggttgctcaaaacttgaaagcttgccagaagagataggggatttagacaacttacgggtgtttgatgccagtgatactctaattttacgacctccgtcttccatcatacgcttgaacaaacttataatcttgatgtttcgaggcttcaaagatggagtgcactttgagttccctcctgtggctgaaggattacactcattggaatatctgaatctcagttactgcaatctaatagatggaggacttccggaagagattggatccttatcctctttgaaaaagttggatctcagtagaaataattttgagcatttgccttcaagtatagcccaacttggtgctcttcaatccttagacttaaaagattgccagaggcttacacagctaccagaacttcccccagaattaaatgaattgcatgtagattgtcatatggctctgaaatttatccattatttagtaacaaagagaaagaaactacatagagtgaaacttgatgatgcacacaatgatactatgtacaatttgtttgcatataccatgtttcagaatatctcttccatgaggcatgacatctctgcttcagattccttgtcactaacagtatttaccggtcaaccgtatcctgaaaagatcccgagttggttccaccatcagggttgggatagtagtgtatcagtcaatttgcctgaaaattggtatatacctgataaattcttgggatttgctgtatgttactctcgtagcttaattgacacaacagctcacttgattcccgtatgtgatgacaagatgtcgcgcatgacccagaaacttgccttatcagaatgtgatacagaatcatccaactattcagaatgggatatacattttttctttgtaccttttgctggcttatgggatacatctaaggcaaatggaaaaacaccaaatgattatgggattattaggctatctttttctggagaagagaagatgtatggacttcgtttgttgtataaagaaggaccagaggttaatgccttgttacaaatgagggaaaatagcaatgaaccaacagaacattccactgggataaggaggactcaatataacaacagaacttccttttatgtaagtctctacttctattagctacaaagtcttcttccaaaatcaatactccatccgttccagtttatgtgaacctattttttgttcgtccattctaaaaagaatgacccctttctaaatttggaaataattttggttaaacttataattctaccattaacgagaagcttttataaccacacaaatattctggggccctttttgaattgtttaggaccataaattccaaaagtcctcattttttcttaaactccgtgcccaatcaaacaagttcacgtaaattggaacggagggaatatattttttcttctcattcttttcccctatttacaggagctcatcaatgggtgatgtacatatcaacaacgagttttaaaggattccaacaagtataactttttatgctcaaatcagctccttgtattgtggagaaagctgagtacgagatgaagttgacgtccgttatcctttatgatctctctgttctttgtgttaacttgcctacttcatcagatgaataacagaagcccgttcctctcattctcaacactgtttgcacgtctgttgttacttgttaaaatggatcttgataaagtaataacatctctatattacttataagtggttttaacaagttcactcttttgcttttgcagttcaaatgggaacacaatgtatattgagaactagaacaatgacactgcatatatatatatatatgtatgtatgtaattctcgtcttttggactagaataccttgtttcattatgaaatgaattaacatcttcgcctttgctgac

SEQ ID NO: 255 - DNA, 9837 bp, Solanum lycopersicum
  source 1..9837: mol_type = genomic DNA
ggatccttctcatttttagattacaagttctatactcttgttctttatagaatatttcaattgtgaattgtaatagttgaaataagttctaagtttaataaaatttgaggaaataattcatcaattaacactcatattttctttctactattttcatcacatacatacttcaaagatatatcattttataatatcaattctaattagcatgagaacacgtgcaagagacacgtgttcaacaactaatattactaaaagtgggaacaaaaaaaattaaaatatcaaaatcatattttatttagttatttaaaggtaattttatttttattcatgatatagtgatgttcatattataatactattattgattactttcttttagggggtaaattgtatggcatggaaaaaaaatattttcagagatgatgattcttttatcattagaaaacttatattagattatttatacttgtatactcgggttagaagttttgtgttctatgagtttctttaatcatgtttgtaattatttcaaagtattgatatatttttataattttgttttactatgttattatataatattgtagagaaaatgatcaaatgccccctcaacgtataactggatttccaactacacacttaaactttacgagagtcctatcacccccctgaactatttaaaaatgaaataattatacccttaaaaaagtcataaccagatctattttcacgtgtttgacacgacatcaaattattattatttttagggataatgcccaagtaccccctcaacctatgcccgaaatttcagagacacacttatactatactaaggtcctattacccccctgaacttattttattaataattttttactcctttttagcctacgtggcactatcttgggggcccaacgatggttgactttttttttcaaactagtgccacgtaagctaaaaaggggtaaaaaaaattacttataaaataagttcaggggggtaataggaccttagtatagtataagtgtgtctctgggatttcgggcataggttgagagggtacttgtgcattttctcttatttttaccatcactagaacaccataagtccattattgggtctttgaggaagaaaagtgaataataatttatagctcgttcagagatatttgaattttgctcatttgatacctaaaattaactttaaaaaagtgagggggggaggtggggggttagaagacgaatattgtcattaatgatggtcaccgaagataaacaatgctctcaaggaagatgaggaggagcaacctatgatgtctgccacatcatcttctatggcgacaacaatttcaaatagggagagagattctacgatatttgatggattaactagattaatagctaaaattttgtagatataattgattgattgagatttgatattctattagtaaaaaaaatatttttttggttggtccaatcggagtcaaagtaaaacccatattgattttctcaaattaggtccaaagtatcctgaggtaatataaatatatgtaaatttatctcaattgattttggatgattggtaatcaagagttttatatgagttcgaaaatttattttgaatcagaaatagtcaatccggtgaagatattgatggcaacaagacttagaggtggtgaaagattgagagatttgttaataaggaaagggccaaaaataccctctaactttaatttattgattgactttatcccatccgttaaaatgaagttatttataccctcgcctttaacaaacttgtcatttctaccctccaaattaacggttgccctaaattgaccccaaatcccaatttcaatttaaattacccatttgaaattgatttcctcttttaaaccggacccaataaacttaataacattggtgaaacttcaaactttcttcccaattttgtcaaaaacagagattttacacaataatatacaactcaatatacataaaccaacaaaaatgaaaatgcaccattagaggaattgaatagctattgccatggtacaaatcgtttctacatagatgataccaaataaatgagagaacaccattacattatttggtgctgttttcttgtactccgacaacccacaacccttgagcgatcccaatggtgacaaacacaactgaagaacttcttgcagatgcacattatctccgggcaacgatgacgatcaaaaagcaagaggacgaaacccttctgcctcaatgtttcacctcttcttctgcaccatattttcttcgatattccctactttcaatcttttaatttttcgccattgatttgaaccaatagcccccaatatttcaattttttgatcttggaaaaccatgttggtaattggtagaagacagcatcgttcaaatcgatttgtgtcgattcgttggaatcagaggaaaagtagtaagaatggaacgtaccagttcgtcggaaccggaggaatattaataaaagagaagaaagtgaacgaagagagttatccttaattgagatgattctggtaacttttttgtgacgattctggtaacctttgatggagaaataagaagtcattgttcaagttattgagagagaaagaggagatgctttgttgttatttgtttactataatgggtcaggttggattgagtttgggtaataaatgatatggcaattttatttgaaattgggatgatttttattgatttgaggctttccctctaaagaagggtacatatgacaagtttttttcaacggtaaggatataaataacttttttttaatggtaagggtaaagttaaccagtaaatcaaagttgatgaagaagaaagattacaaataagaaaaataaataattgaaaatgcatatatttattgaaagagatattaaaaataaagttttagtaatagattttgatgttcactctccaaagagagtgaaatacactaactatgccagctaagcattcagggaggtaattatttcagttttaaatagtacagagggtaataggactcccgtgaagtttaattgtgtagttgaaaatccaaaaatacattgaggtgacattcaatcattttctaaatattaaaaatttaaagatccataaggggcttacaccctactcatggcttacgtcttgccttttactaagtaaattgtccaagagttgctcaagcatattagtggcctaaagcaaaaatcacttattaataatttttatataattgatttcttctagatttcaattgataataataccattgttattttaaattatttttcatgagatataatattccaaatatgtcaaatttcttttaataattccttcatttcatctaataattccttcatttcatgaaaagtttactttttatacaaataatattcaatattttttttaaaaaaatactccttataacctattattattaaatatgaaacccttaagttttggggtctaagacacatgtctttttttagcactgtcgagtcacctctaaaattgtctcgccttacgcgcgtgttcgttaaaacactgcgcagaatgattattataaaaggaagtgttatttgtagttttgatgatgtgacaaactcagagaccttgtaaaggtaccaggttctcaacatgagttttgatgatgtgatatactcaggaaccttgtaaaggtaccaggttcccaacatgaatagcctgttgactgccagccggagaaggtacagaatgggtgcacatttaccaatggcgtgagaaaagtcagaccttttcaacaaatggcaagagtttaaggaaagggacttgtctatacaatgtcactttcctaaacatcattccttagtttttgcaacttgaaaaagtactctcacgaacatttgcaaaggctatagaaaatccaagtgaagaattattcaaataacaactgaaaattcagaagcatatcgtgtagttgtttgagaatatattcttgtggtcttacattgtaaactgttcctaaatctataaaggaatcagtgtggtggtgttgaaattctaagttgtcttgaagggatagcttagtgggtagaataacttctacttatgcttatcaagcaaaagagttattgcttgatcgtgagattaaaaactttctctcacatttgtgtaactggttttacttttacttgcgaattttagtgaaacagttgtgaaaatcctgtgagacaggtcgtggttttactctcttaagcaaggaggtttccatgtaaaattattgtgttgtcaagctgcatttactttctgtttatactttgtgtgtcaagggacctggtccattgactgataagtagacgcataaattctaacagtaagatacttctcctttttctttaatacaagtaatgtaatttatctctaagaaaatataaaagttcaacaaatgaaagggcaagtatgaaaaaaataataatacaaacttacctcttcaattttaaacaatgattggtataaaaagatgctgccccacgttgtctctctctttcttttttatcgttcacatttttaggaaacttgggctacagcaaaagcaaaagtcattactatactcatttttttgtagctacttaaaaaagagaagaaaaaaatggctgaaattcttcttacatcagtaatcaatgaatctgtaaaaatagctggaaatctactgattcaagaaggaacacgtttattttggttgaaagaggacatcgattggctccagagagaaatgagacacattcgatcatatgtttgacaacgcaaaggcctaggaagttggaggtgattcaagggtcagaaacttattaaaagatattcaagaattggcaggtgatgtggaggacctcttagaacgtatagaactttaattacgtaatcaatttttgttgtttgattttatagatttagacaatatatatataattatttatcgttcaacaaagaagacgattgtgtattcgggttgttcatgaatttcaacttttactatttcattttgaattttttggttagtcatttctatcaatttgcttaggacacctgtgcggaattgttatactactccctttatttcatattacttgaatttgtgaggcaatgcctatatatattaagaaaaatattcaaggacataatttaaatcatgattctattattttcctttgtggaatcataaatataactttgtaagtagtttaatttatctcctaaagcgtacagaacttcaataaataaaaggacaaatatggaaagaatttcaaacatccttcttaaactttgaacaattcaattattatgaacaatgcaaaaacttcaaaaattcactttaatataaaataaaggtaatataatataacatgattttttttttaaaaaagaaaaacatatttgttacatatcactgttgggactcgtcctagggcaaaactctggcaaaacgcctcgagactgaactttgggtcttagttcggtaagaatcacgccctaaactgcagattgtacgtcctaagtacgcccaacacccaacgttcggggctcgactaacatatcttatacaaagtaattatgtgttaaaatctgtatagttaacatttttgaccctcatagttcttgaataaatgaatgatacttaataatttttaaatctgtagagataatagtaactcaaataattagttgtagtatcacatttttactattttataacaatgtaaagatgataatataatatgtaacatttctttcaaaacatatagcaaatttttactttttcttgcttattattgattttcttggttttgtcatttgtgtcaaaactatcctattttatttaactatttgaaaataattttattttgattcatgatatagtgatatttttattataataatattattgattattttcttttagggggtaaaaattttaacatcgatagggcgctcaaagcttacgccttgtacttaaagacgcccccttgacaagactgcagcgagtgattgtcatagaaaaaagaaatttctcctttttcattaatgtgcagctgccccacgttgtcactccccttcttctttatcatttccttcttgacattattaggagacttggccgtggactccatctaccactaaaaagctaaagccatcagtatactcattttttggtagctactgaaaaagagagaaaaaaaaatggctgaaattcttcttacatcagtaatcaataaatctgtagaaatagctggaaatttactgattcaagaaggaaagcgtttatattggttgaaagaggatatcgattggctccagagagaaatgagacacattcgatcttatgttgacaacgcaaaggccaaggaagctggaggtgattcaagggtcaaaaacttattgaaagatattcaagaattggcaggtgatgtggaggatctcttagatgacttccttccaaaaattcaacaatccaataagttcaattattgccttaagaggagttcttttgcagatgagtttgctatggagattgagaagataaagagaagggttgttgacattgaccgaataaggaaaacttacaacatcatagatacagataacaataatgatgattgtgttctgctggatcggagaagattattcctacatgctgatgaaacagagatcatcggtttggatgatgacttcaatatgctacaagccaaattacttaatcaagatttgcattatggagttgtttccatagttggcatgcccggtctggggaaaacaactcttgccaagaaactttataggctcattcgtgatcaatttgagtgttctggactggtctacgtttcacaacagccaagagcgagtgaaatcttacttgacattgccaaacaaattggactgacggaacagaaaatgaaggaaaatttggaggacaacctgcgatcactcttgaaaataaaaaggtatgttatcctcctagatgacatttgggatgtggaaatttgggatgatctgaaacttgtccttcctgaatgtgattcaaaagtcggcagtagaatgataatcacgtctcgaaatagtaatgtaggcagatacataggaggggaatcctccctccatgcattgcaacccctagaatccgagaaaagctttgaactctttaccaagaaaatctttaattttgatgataataatagttgggccaatgcttcacctgacttggtgaatattggtagaaatatagttgggagatgtggaggtataccgctagccatagtggtgactgcaggcatgttaagggcaagagaaagaacagaacatgcgtggaacagagtacttgagagtatgggccataaagttcaagatggatgtgctaaggtattggctctcagttacaatgatttacctattgcctcaaggccatgtttcttgtactttggcctttaccccgaggaccatgaaattcgtgcttttgatttgataaatatgtggattgctgagaagtttatagtagtaaatagtggtaataggcgagaggctgaggatttggcggaggacgtcctaaatgatttggtttctagaaacttgattcaacttgccaaaaggacatataatggaagaatttcaagttgtcgcatacatgacttgttacatagtttgtgtgtggacttggctaaggaaagtaacttctttcacaccgcgcatgatgcatttggtgatcccggcaatgttgctaggctccgaaggattacattctactctgacaatgtcatgattgagttcttccgttcaaatcctaagcttgagaagcttcgtgtacttttctgtttcgcaaaagacccttccatattttctcatatggcttattttgacttcaaattgttgcacacattggttgtagtcatgtctcaaagttttcaagcatatgtcactatcccaagcaaatttgggaacatgacttgcttacgctatctgagattggaggggaatatttgtggaaaactgccaaatagtattgtcaagctcacacgtctagagaccatagacattgatcgacgtagcctcattcaacctccttctggtgtttgggagtctaaacatttgagacatctttgttatagagattatggacaagcatgtaacagttgcttttctataagctcattttacccaaatatttactcattgcatcctaacaatctacaaaccttgatgtggatacctgataaattttttgaaccgaggttgttgcaccgattgatcaatttaagaaaactgggtatactgggagtgtccaattctaccgttaagatgttatcaatatttagccctgtgcttaaggcgctggaggttctgaagctcagtttttccagtgacccgagtgaacaaataaagttgtcatcgtatccacatattgctaagttgcatttgaatgttaacagaacaatggccttgaactctcaatcatttcctccaaatctcatcaagcttactctagcctactttagtgtagaccgttatatactggcagtacttaagacatttcccaaattaagaaaacttaaaatgttcatctgcaagtataatgaagaaaagatggatctctcgggcgaggcaaatggttatagctttccgcaacttgaagttttgcatattcatagcccgaatgggttgtctgaagtaacgtgcacggatgatgtcagtatgcccaaattgaaaaagctgttacttacaggattccattgccgaatcagtttatcggaacggcttaaaaagctgagtaaatgaacatctcaacaggtcagtttgctagtataactatttacgtacaggggtgcatcacagcaacgtgagtgtagtagtgttgtttcttgttgtggttgtttgttggttgttcagatctgaaagtgtgaagctcattagaacacgtctcatagtgatattaaatttacttttaaacaataaaggcgtgtaataagtcattgtaataattaaatcatgtaactgatttttcacgagagaaaatttatgtcattttcctttgtaaagataaagtagtcattggttccaattgtaagattaaatacttgaatacataatatcaggattttgaacacgataatcttacatagaaatcattaggggaacatacctgatgaggaagacatcttcacacacaaaaacgaaagtgttagtcgtaaattgatttctacctccttttcctaactttatgttaccacaatcgtcagcgatagaattattctagagaatatgtggttaactctagtgggtggagggaggaccaattcatagaggttgtgatttaatctgatacgtccatcaattaaccaatgtacggacgagatctattacttaataaatattatttatgatattacttggattacgactaaacttgggtcataagtaagaaataattaataataattcttacagtctcccacttggcccaataaccatatatcattaatatttaataaatattagttgcgcatacaatagatctcttctataatgtcaatcatgcataccacaatatgacaaactactaatgcgagttttgacggttgcacataaattttaagctacatacttccttccatatactactacattagcaacttatcatactaggttcataaggtataaaaacatataacattacggtccacaataatgcctcatataaactcatcttgtaatttctcaaaacaataatgtgtacaccattacgagaaacaagatgttcagaaacacataatttgagctc

SEQ ID NO: 256 - DNA, 3947 bp, Capsicum chacoense
  source 1..3947: mol_type = genomic DNA
tggtggtgcatttctgtcttcagctttgaatgttctctttgataggcttgctcctcatggtgatctgctcaacatgtttcagaagaataagaatgatgttcgactcttaaagaagctgaaaatgactttggtcggccttcaggttgtgttaagtgatgcagagaataagcaggcatcaaatcaacatgtgagccagtggcttaatgaacttcgaggtgctgtggacggtgctgaaaacttaatggaacaagtcaattatgaggctttgaggcttaaggtggaaggtcggcatcaaaatcttgcagaaacaaacaaccagcaagtaagtgacctcaaactgaacttgagtgatgattattttctcgacataaaggagaagttggaagaaaccattgaaacattggaggatttgcaaaagcaaatcggtgaccttggcttacagaagcatttagatttgggtaagaaactagaaactagaacaccttcaacttctttggtcgatgaatctaaaatccttggtagaatgattgaaaaagagagattgattgaccgtttattgtcaagtgattcaaatggagaaaatctgactgttgtccctattgttggaatggggggcgtgggcaagacaacacttgctaaaattgtttacaacgataagaaggtgaaagatcattttggcttgaaagcttggttttgtgtttcggaggcatatgatgctttcagaataacaaaaggattacttcaagaaattggatcattcgacttaaaggatgacaacaatcttaatcagctacaggtaaaattgaaggaaagcctaaagggaaaaagatttcttgttgtccttgatgacttgtggaatgatgactgtgatgagtgggatgacttgaaaaatctttttgtacaaggagctatgggaagtaagatccttgtgacgacacgtaaggaggatgttgccttgatgatgggtaatggggcaatcaatgtgaagactctgtctgatgaagtctcttgggatctattcaaacagcattcattaaaaaacagggatccggaggaacatccagaacttgaagaggttggaaagcaaattgcagacaagtgcaaaggattgcctttagctctaaaggcacttgctggtattttatgccgcaaatcagaggtgtacgagtggaaaaacgtcttaagaagtgaaatatgggagctgccaaggcgtaagaatggtatattaccagagttgatgatgagctacaatgatcttcctgcacatttgaagcgatgttttgctttttgtgcaatatatcccaaagattataaattttgcaaagagcaagttattcacctgtggattgctaatggtctggtacaacagttgcattctggtaaccaatactttaatgagttgagatcaagatcattgttcgaaagggtcccagagtcttctgaaagatacggagggaaattcttaatgcatgatcttgtcaatgatttggcccaaattgcatcttcaaaactttgtgtcaggttggaagagtgccaaggatctcatatattggaacaaagtcggcacacgtcgtattcaatggggagagatggtgactttgagaaattgaaaccgctctctaagtcagagcagctgaggacattgcttccaatctctatccagttcctttaccgccctaaactaagcaagagggtgctgcataacatattgccaagactaacttacttaagggcattatcattgtcatgttatgcgattgtggagcttccaaaagatttgtttatcaaatttaagctcctgagatttttggacctttctcggacagagattacaaaattgcccgattctatctgtgcgttgtataacttggagacacttctcctgtcatcttgtgatgatcttgaggagctaccgcttcagatggagaagttgatcaacttgcggcaccttgacatcagcaacacttctcgcttgaagatgccgctacatctgagcaagttgaaaagcctccaagtgctagtgggagccaagtttctactaggtggcccctgtggttggagaatggaagatttgggtgaagcacattacatgtatggatctctatcaattttagaattgcaaaatgtggttgatagaagggaagctcagaaggcgaagatgagggataagaagaagaatcatgttgagaagttatcgttggagtggagtggaagtgatgcggacaattcacaaaccgaaagagacatacttgatgagctacgtccacacacaaaaataaaagaagtcgaaatctccggatatagagggacacagtttccaaattggctagctgatgattcgtttcttaagctgctagtacaattgtctcttagcaactgcaaggactgtttttccttgccagcactaggacagcttccttgtttgaaattcctttccattagaaagatgcatcgaataacagaggtgatggaagaattctatggtagtccgtcctctgaaaagccttttaacactcttgagaagcttgaatttgcagagatgcctgagtggaagcagtggcacgtactagggaacggagagtttcctgcacttcgggacctttcaattgaagattgccccaagttggttggaaatttcctcgagaatctttgttctctgacgaaattgagaatctcaatatgtcctgaactcaatttggagacacccatccaactttcaagtctaaaatggtttgaagtttctggttcttttaaggctggatttatttttgatgaagctgaactgttcaccttaaatattttgaattgcaactctcttacctccttgcctactagcactctgccgagtacgttgaagacaatatggatatgtcgttgccggaaattgaaattggaggcaccagatagtagtaggatgatttctgacatgtttctggaggaattgagactggaggaatgtgattctgtatcatcaactgagttggtcccaagagcacgcactttgactgtgaagaggtgccaaaaccttactaggtttttgattcctaatgggactgaaagactcgatatttggggttgtgagaatcttgaaatattttcggtggcatgtgggacccagatgacgtttttgaatatccactcttgcgcaaagctgaagcggctgccagaatgtatgcaggaactccttccatctcttaaggaactgcatctgtggaattgtccagaaatagaatcctttcctgatggaggattgcccttcaatttacaactcctcgtgatcaactattgcgagaaactggtgaacagtcgaaaggagtggcgtctacagagactccattctctcagagagttgttcatccgccacgatggcagtgacgaagagattgttggtggtgagaattgggagttgcctttctctattcaaaggcttaccatagacaatctgaaaacattaagcagccaacttctcaaaagcctcacctctcttgaaactctagattttcgtaatttacctcaaattcggtcactgctagaacaagggcttccctcctctttttctaagctatatttatacagccatgatgagctccattcactacaaggtcttcagcacctcaattcggttcaaagtctattgatctggaattgccctaatctccaatctcttgcagaatcagcgttgccctcctccctctctaagttgaccatcagggattgccctaatctccaatcccttcccaaatcagcatttccctcctccctctctgagctgaccatcgagaattgccctaatctccaatcccttccagtaaaagggatgccctcttccctctctatactatctatttgcaaatgcccatttctcgaaccactcctagaatttgacaagggggagtactggccagaaattgctcatattcctgaaatatatatcggtcgcactatgt

SEQ ID NO: 257 - DNA, 18284 bp, Solanum tuberosum
  source 1..18284: mol_type = genomic DNA
tgcgcaattcttactgttttataccttttctccctctcttcctctccatcattttcagccttatggatattattgttatgttcctcatgagtatcaacatgcatattcttttctccaaattgttgttcatctcttacaatattattatcataaatttcaccaacattcgtatgatttcggccatttgcttctagaccttttatcgatttctccctttgtattttttctctcaatacaagttgccataagtatttcacaatttccttgttgaatggattttccaagcaaaaataagctccattttccaaagcgttcttggctaagagtctattgagtttatcacctacaactgcataattatattgagaagttaaaaattaaaattaaattatatcatacattatgagaatagttaatttcacacatatatttactgaattttatctgttatgacaacaactttgttatgaaacaatcatttatcatataactataactaaaaacaagattaacaatggatagatgtcgtctcttgacaatagattaacgataaattttatagctaattatatttttgtggtgtattaattgaaacaactgactttacccaatatttataacaagaagtgaaaaatagaattataaatacttaccaagagagattatatttaaggttacagcttgtgtcaagagttcaaaacaatgtaaatctgatgaattgacatcgattatcatcatgtcaatttttttcttttctttggagagcattgacattgccgcaggagtcgtaactgtcgtaactgtatatatccatacattttaaagttaaagttagtgaagaacatgaaaaaaatattatacacaaagttatcatttggatatgtttatttaatttctcattcaaattcaattatgaaatttcatattatgttgctatactttaatttatgaaataacacatattaatcaacttatatcgtaaacggtgtgtgtaatgacccgaaaggtcattttggtaatttttcgtggaaatgactattttgccctttcggtagttgccccgagtcccatgttttatggttgtaaagttagtttgaggaaaagttggtaaaaagttgagtttttgagaagttgagtttttatgagttaaagttggttaaaaagtgctttttcgagttatttggagtttcgggactcggattgaatttccgtcgattccggcaattttagaatgtcgaaacgggtctgtgtgaagttacggagttgaatttggagttgaaacgaagaattgaggtcctaagttgctaaagttgtgaaattgtgataaagagttgactttggtcaacatatgaggttccgaggctcggattgaaattccgaaagtaccgttggtttcgggaggcgattctaagtctagaatgagtcttggttgaatttttagacgctctgtttgagtttcgaattttttttgcgttaaactagtttcttggcatcttattgaatttcgggtcaaggagtcctcgaattcaaattccgacggttccattgagtccggaacgtcgaatttagtgggggtacatatttagtttgtgtgcacgagattccgaacgaatcccgagggtccaacggggacttaaactttggtgttattgttgtgtttcagctgcaatagcagtcctttttaagtcaaaaaacagtagccattttcccccaacttgaaaaatatccatttctacatttttagactttgagagctcgaaaataggtgatttcaagtgggttttcacaaggaattcattgggtaagttatttccaacttatatctttgatttccatcgattatttatggattttaacatcaaaatttgagatcccaactgaaaaatttgggggtttttgcctagtccgaatttaatagaaaatttgagtttgtgaactcatttcaactcctttttcgaaacggttttcactattggattctaaatttcttggggaacatttttcactaaaaatttccagatttcgagaatattttttcggaacgagttttttttgaccattttacccttttctccaaatttcacgatattggtgttgttagattcgtattgattgtgagattccatttatgaatagattgtggtgatttggagcgtgctcgaaagggtaaaactcaaatttgagttactagttgaagtgttttgaggcaagtgacttctaaactttgttaaactcttagactacacatgactactttcctaattgtgttggggagtaatggggattgaggatgggttttatttgttgattgaaattgttgtaaatgaaagatggggaataaaacgagctaagtgtgttatatgtgacttgaatttgttgaataagtcatgtgataaccgatattgaggggatagaagagcatgagtaagctatgattgatacagacattgatgttgagacagatgatgtgtaatactatgatatggttgtgattgagacagacgatgtgtaatactatgatgtggtcgcgatatggttgtgattgagacagataatctgtaatactatgatgtgatcgtgatatgattgtgattgatgacatgtgcatattcattattcatctcatgtgtgaactatctgttgcatgagttctgagacactgatatgaggatggatggctatgagacacagttgagactagctccggctagagatatatgagatggactagctccggctagcgatttggatgccgatgggatctggttccggcggtgatacatggtccatgtgtggcccccatgggttctgatttgagtattcagcgcggactgattacgtcaacagatatgtatcgtaggacagacatgcatcatgactatatgacattattattgcatttgcatcgcatttgacttcatctttgtctgtggtgtgtggagtttacctatttgcccctcttcatgtgatatatgatctatttgctcttacatgaggatatgaggttgatgttgagacactgttggatatatctgttgattatgaattgtgtagtataggttgttggttcgctgttagaatgaagtctcggtggttcggttgggattgaaaggagttgtttgtagctgctagtttagcttagtttagtgttacttgcgagtacctgttgcttttggtactcacccttgcttctacacagtggtgtaggttgacagctctatcagattcgacttattactcatcttcaaattagagcttccagacttacttgagaggtagcggttcattccagacgtgccctcaagttatctatatttattgttttgttctattatagaactttactatgagacttgtatattttattcagattccgtactagaggtttgtacatgtgacaaccaattctggggtttcattgagtttatttaaagacttccgcttatctttctatcttattcttgttttattaattccgtatcgtcgggtttttgggtgttaggcatcacatccggttttggagtgtgacagtgtgtgcaatcttactaatatataatattactttagagtaactaactgtaggaatatataatagagaagattctataggaataattctaaagaatacattctaatttattctttgacttgttgaaaacaaataaacactgaatatatattagattaaatactattaaagcaagatataataggataaaaagttttaagataaatttatgtaaaaagttttaaggttattttatttcataaataagtaacgagagtttaggagatttaacaaattattagaaaggagttaccaaaattatgttgaaaaggtttaacatagcttgattaaggaacaatcgatattaaatactaacaaagtaattgaaaatgaaacaaaaataaatgaggaaaaaatcacatgaaaagatttttcttttcttgtctacatctaataaaagacaaaaaagaaattgaagaaaaaaatcatgaaaatcatatgtccctatttatttgtttgtctacatcgaataaaagacaaaaaagtcatctcagataataatgatagtcagatcatctcttatcatgtctttatctcgctcctctctgttgggttctaaagggtgattagggcttgcaaataatatgattgataaattagttgacaaaaacttatactaaaaactaatattattatatgaaaactaatataaagaaaaatattaaaactgttgagagattaaatctccccataaacaaaactcactaaacgactacattgtggattctattatgttgtgctatgagaatagggatcttcaatttatagatctccaaatttttcctctaaggaaagaataaaccaaatatggaagaaaattatatttttcttttagaaaaagttcaagcatttatggtaatactttgacttttctttaaagaaaaaataaacttcaaataagataagaaaatcagggcaaaaccctaacactctcttcgatcccttactcttattttgtgcctcaatcatccaagtgaatttgttttctttctaaaacgatatatagatttgcaaaaatcaaagatctgtaatttcaaaatcatttatgagggacctaattattttctcctccaacacgatgtcactctaggccgattgacaaagaataagtttcctttttattttttgtacaaaaaagtcaagtgtgaaataattaatataaacttaaactacctcctttatggaaaaatatccgataaaattagaacaacacatactttaacataaaattattgaacctcttaaaaattacacaatcgttatggagaaagctaatcgagtatgtgacatggttataacaaaaacaaaaatggagaatctaatttaattccttataatcatacaaaattcatttattaacttgtaaaacaacatacacaagcatagaaataatgttatgataacaaggaaaggaaaagttctcaataaacatcatatcaattaattctctctatatataatgaaagtcagacagaaattagttctagatatatcacctttgtatccattgaactctagtaaatcaaccattggattagaaaccaattcctcatcttgatataccagcaacacagaaacctcttcagtcaaatcataaaaaggttctgtcattagattaatttgaatttgtaagaaaaacacttacaactgaagctatttataaagtatcatttactggcttatgagcctgtttagagataattatatataaataattttatctaaatatctagataatccctcaaatttgacacaaattgtaatttagatacttgaatttatctaaaagagaccaaataaatacttttactattgtcatatacgcactcatgaacaccttatgctgacatggcaaatttatgtgtattgtaaatgcttgtgttattacattattgaatcacaataaaaagattatttcttaaaaaaattaaatttttgattgacttttattccaacaatcaaattatacaacttggggttcattaactatttctattaatatcaaaatttaacattgattattggatattatttgaagttattgaagatgacattatatttattaagtattaattacacttcttgaatagttggaagattctttgatttgtgtccataattcaatagttcaaatggtgaatgtcttgtcttcaagtaacggctaatggtcttagaattaggccttatttatttttgttcggataaattagcccagagatattctaaatagagtatgatattgtgcactttgaccaagttagcataattttttttttttcaaaaagtctcacacattatggaaaaattacgcgagttggcaaatactactaggttattagtcattgagggtagggtatagtttaatttatttactgtcagtaaatacagtttcagtttttttgccattaataatgagacccaccacctctttgtatacctgtcacaccccaaaatcggatgtgatggcacgtgcccaaaccccaccggacacgtcagcctaacacccaaaaacccgacgatacgaaattaataaaacaagaataagatagaaagataagcggaagtctttaaataaactcaacataaccccagaattggttgtcacatgtacaaacctctaatacggaatctgaataaaatatacgagtctcatagtaaagttctagaatagaacagaacaataaatatagataacttgagggcacgtctggaatgaaccgctacctctcaagtaagtctggaagctctaatctgaagatgggtaataagccggatatgacagagctgtcaacctacaccactgtgtagaagcaagggtgagtaccaaaagcaacaggtactcgcaagtaacactaaactaagctaaactagcagctacaaacaactcctttcaatcccaaccgaaccaccgaaacttcattctaacagcgaaccaacaaccaatactacacaattcataatcaacagatatatccaacagtgtctcaacatcaacctcatatcctcatgtaagagcaaatagatcatatatcacatgaagaggggcaaataggtaaagtccacacaccacagacaaagatgaagtcaaatgcgatgcaaatgcaataatgatgtcatgtagtcgtgatgcatgtctgtcctaagatacacatctgttgacgtaatcagaccgcgctgaatactcaaatcagaacccatgggggccacacatggaccatgtatcaccgccagaaccagatcccatcggcatccaaatcgctagccggagctagtccatctcatatatctctagccggagctagtctcaactgtgtctcatatccatccatcctcatatcagtgtctcagaactcatgcaacagatagttcacacatgggatgaataatgaatatgcacgtcatcaatcacaatcatatcacgatcacatcatagtattacacattatctgtctcaatcacaaccatatcacgaccacatcatagtattacacatcatctgtctcaatcacaaccatatcacgaccacatcatagtattacacatcatctgtatcaacatcaatgtctgtatcaatcatagcctactcatgctcttctatcccctcaatatcagttatcacatgacttattcaacaaattcaagtcacatataacacatttagctcgttttattccccatctttcaattacaacaatttcaatcaacaaataaaactcatcctcaatccccattactccccaacacaattaggaaagtagtcatatgtagtctaagaatttaacaaagtttagaagtcacttgcctcaaaacacttcaactagtaactcaaatctgagttttactcttccgagcacgctccaaatcaccacaatctattcataaatggaatcccacaatcaatacgaatctaacaacaccaatatcgtgaaatttggagaaaagggtaaaatggtcaaaaaaaatctcgttccgaaaaatattttcgaaatctggaaatttttagtgaaaaatgttccccaagaaatttagaatccaatagtgaaaaccgtttcgaaaaaggagttgaaatgagttcacaaactcaaattttctattaaattcggattaggcaaaaaaccccaaattttacagttgagatctcaaattttgatgttaaaatccataaataatcgatggaaatcaaagatctaagttggaaataacttacccaatgaattccttgcgaaaatccacttgaaatcacctattttcgagctctcaaagtctaaaaatggagaaatgggtatttttcaagttggggaaaatggctactgttttttttgacttaaaagggctgctattgcagctgaaacacaaccataacaccaaagtttaagtccccgttggaccctcgggattcgttcgaaatctcgtgcacacaaactaaatatgtacccccactaaattcgacgttccggactcaatggaaccgtcggaatttaaattcgaggactccttgacccgaaattcaataagatgccaagaaactagtttaacgccaaaaaaattcgaaactcaatcggagcgtctaaaaattcaaccaagactcattctagacttagaatcgccccccgaaaccaacggtactcttggaatttcaatctgagcctcggaaccttatatgttgaccaaagtcaactctttatcaaaatttcacaactttagcaacttaggacctcaattcttcgtttcaactccaaattcaactccgtaacttcacacagacccgttttgacattctaaaactgccggaatcgacggaattccgatccgagtcccgaaactccaaataactcgaaaaagcactttttaaccaactttaactcataaaaactaaacttctcaaaaactcaactttttaccaacttttcctcaaactaactttacaaccacaaaacatgggactcgaggtaactaccgaaagggcaaaatagtcacttccacgaaaaattaccaaaatgacctttcgggtcattacaataccgaatcaacaaagccttcatcggcctttatttatgattttatacaaaatcaaatttatctctcatctcctctcctctcctcatttcctatttttctcctaaaataactctttcacttccaatttgaaattcgaatttcactttctccctccagtcgtgttttactttttgcaggtaaccgcctaaatcataggtgaacctcttttttttttttttttcatttttcaattgtatatgtattgtgcttgttagtgtttggataattttttctcaaaattccctcattacttattagataatcatttttatagaaaataaaatggatgattcgactagaggattatgagaggtacgtcattgcatgtcaaagtttttaataatcaaccttcattttcactctgtttaactcaagattttggagtcaatgcagggtctatggaaaaatctaaacaaattctagagtaaaaatctattgaagaattgagatccaagaaaaaaatgacccaattgcacttccagaagtcatcaacaatgtcaaggcaagcgacattaaaattgttgaaggagaaagtaagaggaaagccaaagatagtgattctgaggaggttgtgtctccttcattagatcaagacaaatacgaagaacatcaggtatttgcttaaaacacaattgtatgtagatatttgtatattttgttagtgatatacaaaattgtatgtagtatatgtatattttctgcttacatcacaattgtatatagatatttgtatattttgttagttatatacaaaattgcttgaagtatatgtatattttttgcttaaatcataattgtatatatatatttgtatatcttgtaagttatatacaatagtatgaattaaacaatatacaaaccttacattattatatatacagttaggttacaccaaaaattatcaaattaaagcacaacttttttatcgaatcatatacaattcatatatataattgacttagtaattttatacaactacttacacttatacatggtataagaattttgcacaattacttacatatatacaatattatcaattaaacaatatacaaatcgtataacttatatatacagtaaaattacaacaacaacaacaaaaattatcaaattaaagcacaccgttgttgtcgaatcatatacacttcatatataaaaattgtgtcattcaatttttcgaacaaaaaattagaattgaattggtaataaaaaatttatctaatcttgtataaacaaaattaaattattgcaaaccattagaatgaaaaaaacaaaaataatccgttttccaaaatttcaattatatactatacaaatcaattgtatactttcttgctgttcaaaacatgaagtttccttgaaagaaacgcttacctagcgttgaatatacaagaatattgattaatcttatgcttcagtcgtttgaggaacccagttgttatggtgtttctattgctatagaactcctttttggaaaaatatttgattttggacgattagcttgaacattgggactatataaattttttattaccgtatttagcactcatgtatccatttattaaaaaaaaatgtataaattatatttttaaaagaaaatatacaaaattaatgcttcatagcaaactaaactatgcccattgaatgtaattactaaactatacctatagagcgttatttcattaaatacgtttatcatatatgaaattttcccttaagagatcctacaccttatatatagcttctcaaatgtggaaattcaatctcacacccaacaatctttccctcagactaagtttcatggcccaatatcacaatgatccacgagtcaattcatgagattcactatgtgcatcacccacatcgtctaagtattttatggcaatcaagccctacaactagcttcttctttatatatatatgtgtgtgtatatgtgcgcgcgcgcgcatctctaattaatctcgtaaagggattaaggggccaatttcaaagaattaggcgattttcttagtttttcgtgtgtgttaacccataaatattttggtgatatggttttcggacgatttcttttgtgcaacttatatggaacccttcgtagggagttagtctcacactttttagagtccattttgggcactcaggggctaatttataggaaataggtgatcttctcagtccgtctgtattagcccatgaatattttggtgatatgtcttccgaataatttctttgtaaaatctttacgggaccctccatagggagttaatggagcagtacgtatagtctcacaattttagagttcattttgggcatttaggggccaatttacaggaattaggtgactttctcagtgttttgtgtgtgttagcccattaatatttggtgatatgactttcagacgatttctttgctacacatttacgaaaccctctgtagggagtcgggggagcagtacgtacaatctcacaattttagagtccattttagacatttaggggccaatttaaagaaattggacaattttctcagtttttcgtgtctgttagccattaatatattggtgaatatgacctacggatgatttctaatagaaatctttacgaaaccttcaatagggagttgggggagcaatacgtaccgtctgacaatttttagagtccattttgggcatttaagggccaatttacaggaattagacaattttctcagtatttttccatgtgttagcccataaatattttgttgctttgacttttagagtctaaacttctcatgtatattaagagatatttatgcttggttaattgaatcgaactaggaatagagaaattcctacttggatcttaatatttctctctctttgatttggaaaattctacgaagttgctttcaatggaattaaaatcataaatctattgtatgtaagaaacatacttatattcatgaatagatatgtgtagggtctaataatgaattatcacaattttttctactttttcctgtcagagtcctgctttttctttttctttttcttttttaactttggtctctgcttttgtctacatgatgataaggttggtggacctagctggaaatgtgatggaaatagctagtaaaagaaagaactttgcattttctgttttcttaaaaactgaaaaattacataacttgtggcaatttgttcattttcatactgagagatatttctattttttggatatatggcttatgctgctgttacttcccttatgagaaccatacatcaatcaatggaacttactggatgtgatttgcaaccgttttatgaaaagctcaaatctttgagagctattctggagaaatcctgcaatataatgggcgatcatgaggggttaacaatcttggaagttgaaatcgtagaggtagcatacacaacagaagatatggttgactcggaatcaagaaatgtttttttagcacagaatttggaggaaagaagcagggctatgtgggagatttttttcgtcctggaacaagcactagaatgcattgattccaccgtgaaacagtggatggcaacatcggacagcatgaaagatctaaaaccacaaactagctcgcttgtcagtttacctgaacatgatgttgagcagcccgagaatataatggttggccgtgaaaatgaatttgagatgatgctggatcaacttgctagaggaggaagggaactagaagttgtctcaatcgtagggatgggaggcatcgggaaaacaactttggctacaaaactctatagtgatccgtgcattatgtctcgatttgatattcgtgcaaaagcaactgtttcacaagagtattgtgtgagaaatgtactcctaggccttctttctttgacaagtgatgaacctgatgatcagctagcggaccgactgcaaaagcatctgaaaggcaggagatacttggtagtcattgatgacatatggactacagaagcttgggatgatataaaactatgtttcccagactgttataatggaagcagaatactcctgactactcggaatgtggaagtggctgaatatgctagttcaggtaagcctcctcatcacatgcgcctcatgaattttgacgaaagttggaatttactacacaaaaagatctttgaaaaagaaggttcttattctcctgaatttgaaaatattgggaaacaaattgcattaaaatgtggaggattacctctagcaattactgtgattgctggacttctctccaaaatgggtcaaagattagatgagtggcaaagaattggggaaaatgtaagttcggtcgttagcacagatcctgaagcacaatgcatgagagtgttggctttgagttaccatcacttgccttctcacctaaaaccgtgttttctgtattttgcaattttcacagaggatgaacagatttctgtaaatgaacttgttgagttatggcctgtagagggatttttgaatgaagaagagggaaaaagcatagaagaggtggcaacaacatgtataaacgaacttatagatagaagcttaattttcatccacaattttagttttcgtggaacaatagaaagttgtggaatgcatgatgtgacccgtgaactctgtttgagggaagctcgaaacatgaattttgtgaatgttatcagaggaaagagtgatcaaaattcatgtgcacaatccatgcagcgttcctttaagagtcgaagtcggatcagaatccataaggtggaagaattggcttggtgtcgtaacagtgaggctcattctattatcatgttgggtggattcgaatgcgtcacactggaattgtctttcaagctagtaagagtactagatcttggtttgaatacatggccaatttttcccagtggagtactttctctaattcatttgagatacctatctttgcgttttaatccttgcttacagcagtatcaaggatcgaaagaagctgttccctcatcaataatagacattcctctatcgatatcaagcctatgctatctgcaaacttttaaacttaaccttccatttcccagttattatcctttcatattaccatcggaaattttgacgatgccacaattgaggacgctgtgtatgggctggaattacttgcggagtcatgagcctacagagaacagattggttttgaaaaatttgcaatgcctcaatcaattgaaccctcggtattgtacagggtctttttttagactatttcccaatttaaagaagttgcaagtatttggcgtcccagaagactttcgcaatagccaggacctgtatgattttcgctacttatatcagctcgaagaattgacatttcgtttatattatccatatgctgcttgctttctaaaaaacactgcaccttcaggttctacgcaagatcctctgaggtttcagacggaaatattgcacaaagagattgatttcgggggaactgcacctccaactttactcttacctcctccggatgcttttccacaaaaccttaagagtttaacttttaggggagaattctctgtggcatggaaggatttgagcattgttggtaaattacccaaactcgaggtccttatactatcatggaatgccttcataggcaaggagtgggaagtagttgaggaagggtttcctcacttgaagttcttgtttctggatgatgtatacattcgatactggagagctagtagtgatcactttccgtaccttgaacgagttattcttagagattgccgtaatttggattcaatccctcgagattttgcagatataaccacactagctcttattgatatagattactgtcaacaatctgttgtgaattccgccaagcaaattcaacaggacattcaagacaactatggaagctctatcgaggtccatactcgtcatcttttgtaagacatcttcttccttgctttacaacaataattaactcatcatcatagtaaactcgataataatctggataatagccttagtaagtcaaattgcaccaattcaacaaaagttcttgatgctgtcattgtgtttgatttgaatccttccaatattgtgtaacttgttatacttgcatgttcattcttgattttgggaagtgtaacatttcatttttcatcttttgtggctagcattcccaagagtgtgacaacagttgaagatgatgatgatagtgtgacaacagatgaagatgatgatgatgatgactttgagaaagaagttgcttcttgccgcaataatgtgtaagttcttatacctgcatgctcattcttgctataatgttctcttgttccttaattatgggacatctgacatattattttccatgttttgcgtcttttatttttctgcagcgagtagttaaggtgttctgaggactagccagttctctgaaataaatgtcaaatcagaagccaaatgtgtgagtgtttgttttgttcgttttcattttttctgcataaggtggcaggatgattgcaaatggcttgtaatttaattgtatatgatctttcgtatagccatttgtcagtggttcttaagatactccaaattttatgcacatacatacatactgtacaggccagaacagactccagtaacgtgtgtttcctttcttgggagtcctcaatctacctcgcaaaggctaaatccagtggcaccagctttattactaaaacattcacacgggaacagttgagaaaaactaggcctccataccaaacacacccttaaacttgagctggttgatagagactagagagtagagagcactacatggattatggacctagctaaaagaaagaccttttgtttgaagataagcttaagaaattcgcacactctctgtcaccttgacacaagtgttctcctcgaccccaactaataatgtatgatcacaaatttcctgtcttttttttaaactttggtctcttcttttgtctacatgatgataaggttagtgacctcgcatctttctactttatcctgttagtggacctagctggaaatgtgatggaaatagttagtaaaagtaagatctttgcattttctgttttcttaaaaactgaaatattacataacttgtggcaattaatttgtccattttcatactgagagtgagagagtcctattttttggatttatggcttatgctgctgttacttcccttatgagaaccatacaccaatcaatggaaattattcaatgtgatttgcaaccgttttatgaaatatgttttttgacttacaaacattgaattaaaatcttttgaacttttataaattaagatttttttcttttaaagaaatcgatactgtaatcctctatatcaacgagcttactcatgtgaaggtcaagtgataaaaccaggggccagagccagtctagacctagggggttcggagcttttgtaattggatcattgtgattacgggttgaatgtctaattttctaggcgattatgatagtattttgtatctgaataatagctcactttttctaagtaatggaaaagaaggtcaaaacgtgccactaaaagacttgactaagacaaaaatgggttgtcaagaacgtagaggagggtaggatggacagttggtcagatctagtatggataatacatggaggtagttggagtggcggctctcccaaaattctgtcatcttagatctttggattcggtcttatacatatgtgaggaaggtaatgaaaaatattggggtagaggattacaacatggggaatcaagatttcagatggtcagtcaactaactgagctactaagatttcaaaaaaaagaaaaagaagggttccatgtgacatgaaagtctcatattgcatagtttttgaatgaggcaaagaagtgaggaatcagatgaaccaccttcgatggaaaattatactatttatacatatagttaaaattgttttctatctttatattattgtagtcagctaatttgcatgtttacttattcatattttgaatagacataatacataaatacatcctttaacttggcttcaaatcaaatttatgcccttcaactttggatgtgcacaaatagacatttaaatttgtataaagttgaagaaatagacacacatgtcctacatgacatcctacatgtcattttttatcctacgtggtgtcttacgtgtattgtgtcatgtaggactcgtgtggctagtcgctcaactttatacaaatttaagtgcatacttgtgcatacccaaagtcggagaacataaacgtcaaatgaggtcaagttaaagggcacatttatgtattatgccttcttgatttcattaataatgaaaatcctgaatcatattcagattccgtcactaatcgttgaattaatatactatgtattatttattggatttttttgctatcttatttttaattgttcaaagttttgtttattatctttagcataatatctgattatattattttgatatactttttctagccctaattacttgtccatttttgaattgacacacctattaagaaaacaattattgaaatagtgagtttactattttacccatattaattatgaagtgggtgatttaaaaactcaagattttcaaaaagttctacttttttcaaagtaataaattaagggtataatatgtaaaaaaaattattctttcttgatttgtcaaaatagaaaagtaattaggaataactaaaaaaatggataaataattaaaaacggagggagcaatatgttatctttagcctaataatatctgattaatggccaccctaattgattggataggagaggatagacttgcttccaagtaagccaaaatataaaaagttgacaaaagggtgctaaattcgagacacatgtagtacttatataattcatgtgcggactcgttcttttgtagtactccttccgttctattttatatgtcatatttttattttatactttcattaagaaatgatgtaattttatctttctattcttatttaatgtttttttaagtcaattttataataaatgatgaatatattttcaagattaattaactactctatcaagggtataataggtaaaatatggtaatttatacataaattttataaaatgacaagtattgtggtccaactatttatagaaagagatgacatataaaatgggacggagggagttataaagttgacttaagaaaacatttaataagggtagaagggtaaagttacattatttcttaatgtaaatgtaaagtaaaaatgtaacatataaaatgggaaggagggagtagtattttctcgttttattttacgtggcactctattctcataatctatctttaaaaatgtcattttattgtaattgaaaataatttaacttaaaattctccatctacccttaattaatgaaatgatttacaattatataaatatataaaaattgttttagcttataattttctaaaatctttttttctcttatacatcgtattaagtcaaacaatactaagtcaaatggaatggcggagtatttcttttattttttttcacaccgtccatatgttttctcccatcccccagacccccactatgtatattcactccttagttgaatctgaatttagagtttagaagctt

SEQ ID NO: 258 - DNA, 396 bp, Arabidopsis thaliana
  source 1..396: mol_type = genomic DNA
atgtctacaccatcaggttcaaatccgttaccaatggccgacaagttagaagcaaaaggtcgtatagcatccatcaagttcgactatgtcaagaatggtcaacctaaagctggatcaacccatggtgtctcatatcacaatttcaccgagtggtttgatcttaaccatacatgcgatgagcatatcttatctgtgaagtgttactacgatgatggtgagatacaaggacttgtgatcaaaaccaatatcaggacgtctgcatatatgggatataacattggtactacgtttacacttgaagtcaaaggcaagaagatcgttgggtttcatggatcttttgataaaaaccttacctcgcttggagcttatttcgcaccgctttctcctgctaagtaa

SEQ ID NO: 259 - DNA, 978 bp, Pepper mild mottle virus
  source 1..978: mol_type = genomic DNA
cacaaacacgtttttattccggctgtgtagtctttcaacgttgtcttccgatgcccgtgtttccaaacttcagccaagaaatcgtctaagcctaaccttttccaaatctcatactcgactgcacaatgaaattcgttctgtgatttgtcatacttggaaatgtctagctctaatatgtccataggaacattagagtccagatctgagaaaaattcttcgatctgtgtaggcgttttccttgtataaaacatgaatcttgaactgtcaattgtctctagcagctgtcttgttaattctgaaaatacaggaccaaaaagcgcattgattttcttgctatgatacacaatagtttgcaaagccgggtattcagtttgaatactaagatccaaacgctgtttcggctgctgcttgatcatgtgcctgtattgatcaacggctggtaaatcaataaagtcaaaatcagccaactggccaattgttgacttctcttgcttttcgatccatctttccaaactcgcccttgaaagcagaggtatattttttggttttttcttttctttaattaagtatgcatcaaaaaacttatctactactagagaagcggtgtcttcgatgtcaacaacccctactaattcgggagagttgaaatttcttttgatcatcgcgaccaaattttccaacaatccaggttttcgaggtttttcagcagcagtcctgatcacaggtttcaatgtcgtctcagattctctcggaagaggcaccgatttcgacatatccaacacacaatccttgacattcaaactattctctcgtatttgcatagttacagcatcatactcattgagtatagtactgtttcccggcaaacacttgtcgtaataatattgcatgtcagaaacatctcctgtttttggtgctgcgacgaaaaggttaacacctttgtacaccgattctatctgtaattgctattgagtcgac

SEQ ID NO: 260 - DNA, 2370 bp, Bacillus thuringiensis
  source 1..2370: mol_type = genomic DNA
atgaacatgaataatactaaattaagcgcaagggccctaccgagtcttattgattattttaatggcatttatggatttgccactggtatcaaagacattatgaatatgatttttaaaacggatacaggtggtaatctaaccttagacgaaatcctaaagaatcagcagttactaaatgagatttctggtaaattggatggggtaaatgggagcttaaatgatcttatcgcacagggaaacttaaatacagaattatctaaggaaatcctaaaaattgcaaatgaacagaatcaagtcttaaatgatgttaataacaaactcgatgcgataaatacgatgcttcatatatatctacctaaaattacatctatgttaagtgatgtaatgaagcaaaattatgcgctaagtctgcaaatagaatacttaagtaagcaattgcaagaaatttctgataaattagatattattaacgtaaatgttcttattaactctacacttactgaaattacacctgcatatcaacggattaaatatgtgaatgaaaaatttgaagaattaacttttgctacagaaaccactttaaaagtaaaaaaggatagctcgcctgctgatattcttgatgagttaactgaattaactgaactagcgaaaagtgttacaaaaaatgacgttgatggttttgaattttaccttaatacattccacgatgtaatggtaggaaataatttactcgggcgttcagctttaaaaactgcttcagaattaattgctaaagaaaatgtgaaaacaagtggcagtgaagtaggaaatgtttataatttcttaattgtattaacagctctacaagcaaaagcttttcttactttaacaacatgccgaaaattattaggcttagcagatattgattatacttctattatgaatgaacatttaaataaggaaaaagaggaatttagagtaaacatccttcctacactttctaatactttttctaatcctaattatgcaaaagttaaaggaagtgatgaagatgcaaagatgattgtggaagctaaaccaggacatgcattggttgggtttgaaatgagcaatgattcaatcacagtattaaaagtatatgaggctaagctaaaacaaaattatcaagttgataaggattccttatcggaggttatttatggtgatatggataaattattgtgtccagatcaatctgaacaaatttattatacaaataatatagtatttccaaatgaatatgtaattactaaaattgattttactaagaaaatgaagactttaagatatgaggtaacagctaattcttatgattcttctacaggagaaattgacttaaataagaagaaagtagaatcaagtgaagcggagtataggacgttaagtgctaaagatgatggagtgtatatgccgttaggtgtcatcagtgaaacatttttgactccgattaatgggtttggcctccaagctgatgaaaattcaagattaattactttaacatgtaaatcatatttaagagaactactgttagcaacagacttaagcaataaagaaactaaattgatcgtcccgccaagtggttttattagtaatattgtagaaaatgggaacttagagggagaaaacttagagccgtggatagcaaataataagaatgcgtatgtagatcatacaggcggagtgaatggtactagagctttatatgttcataaggacggaggattttcacaatctattggagataagttaaaaccgaaaactgagtatgtaatccaatatactgttaaaggaaaaccttctattcatttaaaaaatgaaaatactggatatattcattatgaagatacaaataacaatttagaagattatcaaactattactaaacgttttactacaggaactgatttaaagggagtgtatttaattttaaaaagtcaaaatggagatgaagcctggggagataactttacaattttggaaattagtccttctgaaaagttattaagtccagaattaatcaatgtaaataattggattcgcacgggatcaactcatattagcggttatacactcactctctatcagggaggaggaggaaatctaaaacaaaaccttcaattagacagtttttcaacttatagagtgaatttttctgtgaccggagatgctaatgtaaggattagaaattctagggaagtgttatttgaaaaacgatatatgagcggtgctaaagatgtttctgaaattttcactacaaaattggggaaagataacttttatatagagctttctcaagggaataatttatatggtggtcctcttgtacatttttacgatgtctctattaagtaa

SEQ ID NO: 261 - DNA, 2370 bp, Bacillus cereus
  source 1..2370: mol_type = genomic DNA
atgaacaagaataatactaaattaaacgcaagggccctaccgagttttattgattattttaatggcatttatggatttgccactggtatcaaagacattatgaatatgatttttaaaacggatacaggtggtaatctaaccttagatgaaatcctaaagaatcagcagttactaaatgagatttctggtaaattggatggggtaaatgggagcttaaatgatcttatcgcacagggaaacttaaatacagaattatctaaggaaatcttaaaaattgcaaatgaacagaatcaagtcttaaatgatgttaataacaaactcgatgcgataaatacgatgcttcatatatatctacctaaaattacatctatgttaagtgatgtaatgaagcaaaattatgcgctaagtctgcaaatagaatacttaagtaaacaattgcaagaaatttctgataaattagatattattaacgtaaatgttcttattaactctacacttactgaaattacacctgcatatcaacggattaaatatgtgaatgaaaaatttgaagaattaacttttgctacagaaaccactttaaaagtaaaaaaggatagctcgcctgctgatattcttgatgagttaactgaattaactgaactagcgaaaagtgttacaaaaaatgacgttgatggttttgaattttaccttaatacattccacgatgtaatggtaggaaataatttattcgggcgttcagctttaaaaactgcttcagaattaattgctaaagaaaatgtgaaaacaagtggcagtgaagtaggaaatgtttataatttcttaattgtattaacagctctacaagcaaaagcttttcttactttaacaacatgccgaaaattattaggcttagcagatattgattatacttctattatgaatgaacatttaaataaggaaaaagaggaatttagagtaaacatccttcctacactttctaatactttttctaatcctaattatgcaaaagttaaaggaagtgatgaagatgcaaagatgattgtggaagctaaaccaggatatgcattggttggttttgaaatgagcaatgattcaatcacagtattaaaagtatatgaggctaagctaaaacaaaattatcaagttgataaggattccttatcggaggttatttatggtgatacggataaattattgtgtccagatcaatctgaacaaatatattatacaaataacatagtatttccaaatgaatatgtaattactaaaattgatttcactaaaaaaatgaaaactttaagatatgaggtaacagcgaatttttatgattcttctacaggagaaattgacttaaataagaaaaaagtagaatcaagtgaagcggagtatagaacgttaagtgctaatgatgatggagtgtatatgccattaggtgtcatcagtgaaacatttttgactccgataaatgggtttggcctccaagctgatggaaattcaagattaattactttaacatgtaaatcatatttaagagaactactgctagcaacagacttaagcaataaagaaactaaattgatcgtcccgccaagtggttttattagcaatattgtagagaacgggtccatagaagaggacaatttagagccgtggaaagcaaataataagaatgcgtatgtagatcatacaggcggagtgaatggaactaaagctttatatgttcataaggacggaggattttcacaatttattggagataagttaaaaccgaaaactgagtatgtaatccaatatactgttaaaggaaaaccttctattcatttaaaagatgaaaatactggatatattcattatgaagatacaaataataatttaaaagattatcaaactattactaaacgttttactacaggaactgatttaaagggagtgtatttaattttaaaaagtcaaaatggagatgaagcttggggagataactttattattttggaaattagtccttctgaaaagttattaagtccagaattaattaatacaaataattggacgagtacgggatcaactcatattagcggtaatacactcactctttatcagggaggacgaggaattctaaaacaaaaccttcaattagatagtttttcaacttatagagtgtatttttctgtgtccggagatgctaatgtaaggattagaaattctagggaagtgttatttgaaaaaagatatatgagcggtgctaaagatgtttctgaaatgttcactacaaaatttgagaaagataacttttatatagagctttctcaagggaataatttatatggtggtcctattgtacatttttacgatgtctctattaagtag

SEQ ID NO: 262 - DNA, 2310 bp, Bacillus cereus
  source 1..2310: mol_type = genomic DNA
atgaaaaatatgaagaaaaagttagcaagtgttgtaacctgtaccttattagcccctatgttttttaatgggaatgtaaatactgcttacgcggacaacaaaatcaatcaggattcttcaaagcaggaataccaacagaaagagatggatcgaaaaggattgcttgggtattattttaaagataaagattttagtaaccttactatgttttcaccaacacgttataatacccttatttatgaccaacaaacagcgaataaattattagataaaaaacaacaagaatatcagtctattcgctggattggtttgattcagagtaacaaaacaggtgacttcacatttgaattatcagatgatgaatgtgcgattatagaaatggatgggaaagtgatttctaataaaggtaaagaaaagcaagttgtccatttagagaaaggaaaattagttccaattaaaattgagtatcaattagacgagccattaaatatcgatgatgaaaaattcaaagggtttaaattattgaaagtagataatcaaaaacaactacatcaagtacaacaagatgaattaagaaaccctgaatttaacaaaaaagagtcacaggaatttttagcgaaagcatcgaaaataaatctttttacgaaaaaaattaagagggacattgatgagggaacggatacagacggtgactctattccggatatgtgggaagaaaatgggtatacgattcaaaatagaatcgctgttaaatggaatgactcgctagcaagtaaagggtatacaaaatttgtttctaatccccttgacagtcacacagttggtgacccttatactgactatgaaaaagcatcgagagatttagatttgtcaaatgcaaaagaaacatttaacccattggtagctgcttttccaagcgtgaatgttagcatggaaaaggtgatattatctccaaataaaaacttatctaatagtgtagaatcgcactcatctacgaattggtcttataccaatactgaaggagcatctgttgaagctgggattgggcctaaaggtttttcttttggggtaagtgcaaactatcaacattctgaaacagttgcacaggaatggggggcatctataggagatactacgcaacttaatactgcgtcagcaggatatttaaatgcaaatgttcgatacaacaatgtgggaacaggagccatttatgatgtaaaacctacaactagctttgtattagaaaagaatacaatcgcaactattacggcaaaatcaaattcaacagctttaagtatatctccgggagaaagttatccgaaaaaaggccaaaatggaattgcgataacatccatggatgattttaactcacatccaattacattaaataaaaaacaattagatcaagtattgactaataaccctattatgttagaaacagaccagacagatgggatttataagataaaagatacacatggtaatattgtcacaggtggcacatggaatggtgtaactcaacaaattaaagcaaaaacagcgtctattattgtggatgacgggaaacaggtagcagaaaaacgtgtggcggcaaaagattatgcttatccagaagataaaacaccgtctttaactttaaaagatgcactgaagctttcattcccagaagagataaaagaaacagatggattattgtactataacaacaaaccaatttatgaatcgagtgtcatgacctaccttgatgggaatacggcaaaggaagtaaaaaaacaaataaatgataaaacaggggaatttaaggatgtccaacatttatatgctgttaaacttacacccaaaatgaattttactattaaagtaccggttgcgtatgatacagccaaacaggctgttaatcttggaggggataatccatggggggctaaaggattattagggacatgggtaaatgccatggttgtagataattccggagataaagcatataaaagggttgaacctggttatctactttcacctacattggagttttcagaaggttcattagacaatttaaagaaaaattatagtttttatgttagtatgtacgtgaaatcagataaaccatttactctaagaataaatgctggaccctatagtaccaagagaaccatagaagcatcaaatgattttaaacgcgttgatattcctgcgttttatatagaaggatttccgatagacactataagattagaaggttctgactatccatcggcaatatggtggaaagatgtttcaattacagaagtgtcagcagtaaaaaaataa

SEQ ID NO: 263 - DNA, 1389 bp, Bacillus cereus
  source 1..1389: mol_type = genomic DNA
atgaaaagaatggagggaaagttgtttatggtatctaaaaagttacaattagttactaaagctttattgtttagtacagttttatctatacctttattaaataatgaagaggtaaaagctgaacatttaaatctaaattctcaaagtaaatatcctagctttcaaaatcaaaaaatcactgataatgcagaggattttaaagaggataaggaaaaagcgaaagaatggggagaagtaaaagaaaaagagtggaaattaaccgctactgaaaaaagaaaaataaatgactttttaaatgatacaaacaaaataaaaacaaattataaagaaattactttttctatggcaggttcatttgaagatgaactgaaagatttaaaagaaattgataagatgtttgataaagccaatctctcaagttctattatcacctataaaaatgtggaacccgcaacaattggatttaataagtctttaacagaaggaaatacaattaattctgatgtaatggcgcagtttaaagaacaatttctaggaaaagatattaagtttgatagttatctagatactcatttaactgtccaacaagtttctagtaaagaaagagttattttgaaggttacagtgccgagtgggaagggttctactaatccaacaaaagcaggtgttattttagatggaaatgaacacaaaatgctcattgataatgggtatgtactccatgttgataaggtatcaaaggtagtaaaaaaggggctggagtgcttgcaagtggaagggaccttaaaaaagagtcttgactttaaaaatgatataagtgctaaagcgcatagttggggcatgaaaaattatgaagaatgggctgcaaatttaaccgattcccaaagaaaagctttagatggctatgctaggcaagattataaaaaaatcaatgattatttacgaaatcaaggcggaagtggaaatgaacaattggatgcacaaataaagaacatttctgaaactttaaacaataagccaataccagaaaatattactgtgtatagatggtgtggtatgccagaatttggttatcaaattagtgagcctttacctgccttaaaagattttgaatgggaatttttaaacacaatcaaggaagacaaaggatatattagtacgagcttatcaagtgaacgtctagcggcttttgggtcaagaaaaattatattacgattacaaatcccaaaaggaagtaaaggcgcatatttaagtgccattggtggatttgcaaatgaaaaagaaattcttctggataaagatagtaagtatcatatcaataaaataacagaagtagtcattaaaggcattaagcgatatgtagttgatgcaacattattaacaaattaa

SEQ ID NO: 264 - DNA, 1104 bp, Bacillus thuringiensis
  source 1..1104: mol_type = genomic DNA
atgaaaaatagattttcaaaagtggcattatgcaccgtaccgattttaatggtttctacattcgccagttcaagcatgtcagcttttgctgcagaagccaaatcaccagatttaaatgtatctcaacaagtaataggtccctatgccgaatcttatattgatattgtgcaggatagaatgaaacaaagggataagggatcaaaattaactggtaaaccaataaatatgcaagaacaaataatagatgggtggtttctagctagattttggatatttaaggatcaaaacaataaccatcagacaaatagatttatatcctggtttaaagataatattgctagttcaaaagggtataatagtattgcggagcaaatgggtttaaaaatagaagcagaaaacgatatggatgtaacaaatatagattatacatctaagacaggcgataccatttataatggtatttcagaattgaaaaattatacaggatcaactcaaaagatgaaaacagatagttttcaaagagattatacaaaatcagaatctacttcagtaactaatggattacaattaggatttaaagttgctgctaaaggagtagttgctttggctggggcagactttgaaaccagtgttacttataatctatcaactactacaactgaaacaaatacaatatcagacaagtttactgtcccatctcaagaagttacattgcctccaggacataaagcgatagtgaaacatgatttaagaaaaatggtttattctggtactcatgatctaaagggtgatttaattgtgagttttaatgataaagagattgtacaaaaatttatttatccaaattatagagaaattaatttatctgatatccgtgaaactatgattgaaattgatgaatggaatcatgtaaaccctgtgaatttttatgaattagttggggtcaaaaatcatataaaaaatggtgaaactttgtatatagatactccagctaaatttatgtttaatggtgctaatccatattatagagcaacatttacagaatacgacgggaataataatcctgttcaaacaaaggtattaagtgaaaactttaaattgtag

SEQ ID NO: 265 - DNA, 2862 bp, Spodoptera exigua
  source 1..2862: mol_type = genomic DNA
attgtgaagtgaaatgagatcataatatatttgtgtgtagcgatatttttattaagtagataaatttaaggaccataaatgaagaacctctaacaatttataatttgtgtaaaacataataaacagtttttaactgtgaatgtgcattaccgatttagtatgtgatttaaccccagtgataagagacttatcacttgctgttatttatataactttgatctgattacgaatcttaattaattacaaaatgtatatacatcgatcgactgtgttacgactgtgtgtgtgggtgagcctgttggctctatgtggggcccaacgcgcagagcaactcctggcacagaatccttgctccagcaagacgacgtgcagtgactgcatccgcacggccagctgcgcttggcgttttgcaggagagttcaatggccctcggtgcttcaaccctgccatggagcgagatggcactgcaggatgtgaagaatcctacatattcaacccagataataaacgctctgtcgaccccatgtacaatatggagttaagcagagctaagtctagaatgggcatgtctgctggttcatcttcttatgaagagtcttacagtgcacagggcagtagctttgctgcatcgggatcggcagcaggcgcaggcgctgaagcaggtggcgaaagattggtgcagatgaaacctcagaaagtgaatctcaacctcagaatgaatcaaatgcagaaacttacatttgcgtactccagagctcaagattatcctgttgacttatattaccttatggacttgagtagatctatgaaaaacgatagagagaaactcagtaccctgggaagtttactgtctgctaccatgaggaatatgacgtccatgttcaggatcgggttcggctcctttgtagataaactagtcatgccttatgtatctacagtgcctaagaatttgatatcaccttgcgacggttgcgcagcgccttatggataccaaaatcaaatgtctctgagtactgacaccgacttctttgagaaagcagtagctaacgcagacgtgccgggcaacttggacgcccccgaaggagggttcgacgcgatcatgcaagccgtggtgtgcaagcaacagatcggctggcgagaccaggctaggcgacttcttgttttctccacagacgctggtttccattatgctggcgacggaaagctcggtggtatcgtccaacctaacgatggcgaatgtcacatgaaggacaacacgtacacacactcgacgttgcaggattaccccagcatttcacagattaatcataaggtgaagaagcacgctatcaacgtaatctttgcggtaacggcggaacagatcagcgtgtacgaacagctgagcaagcacatcgaaggttccagtacgggagtgctgagcaacgattccgataacatcgtcgacctcgtccgggaacaatacaacaaaattacgtcaactgtagaaatgaaagactcatcgagtgacgctgtgcaaatagtgtattactcatcttgtctcagcggcaaagaactcacacagacgaacaaatgcgacggattaaaggttggcgatgtcgtggaattcacggctgagattacattgaaagaatgtcccaaagaccgcagcaagtggaagcagactttcgagatctcccccgtcggtatctctgacagcctcactgttgaactggaaatggtctgcgactgtccctgtgaacagcccaatcatcacgcgtacaacgacagtccgctagtatgcagcggcgagggcgtgtctgcgtgcggggtgtgcgtgtgccggccgggccgcttcggcaagaactgcgagtgctcggcgcacggcggcgtctccgccgagcaggagcgcggctgccgccccaccaacgccagcgccggcccgctctgctccaaccgcggcacctgcatctgcggcgtctgcgagtgcaacaagatggacgacccgctcaaggtgatttctggcccgttctgcgagtgcgataacttcacgtgtgacatgaacaaaggtttgctctgctcgggccccgaccacggggaatgtgtctgtggcaaatgtagctgtactcccgagtacaccggaccagcttgccagtgtttgaaggaccaaactccttgtcgatcacctgaaaataacgaaatatgtagcggtaacggaaaatgtgtctgcggtcagtgcgtgtgcaatgtagatgacgaccgtcattattccggaaaatactgtgaaaaatgtcccacctgcccaggccgctgtggtgaattcaaagactgtgtattatgcgaggtacacaaacgtggcccgctgtacaatgccgacacagacacctgtggcgactgtgcgctctatcccataatcgaagaaggcaaaattgaagccaacgaatctcgaaacgaacatttgtgtagtttctacgacgatgaagattgtttatatgtgtacgtgtactcctacaatgagaaccagcagcttgtcattagagcacagaaggaacgggaatgtcccaagaaggtaccaatcttgggaattgtgttgggagtgatcgctgcgatagtgttggttggtttggctttactgatgttatggaagatggcgactactatacacgaccgcagagagtttgcgcgcttcgagaaagaacgtatgatggccaaatgggacacgggcgagaaccctatttacaagcaagcaacatcgaccttcaaaaatcctacatatgctggaaaataattgtattacattacacaaaatagtcagcaaataaaatagtcgtctcaaaacgtaaagcaatcgaatgccgcatttataaaattatcaagatgtcagta

SEQ ID NO: 266 - DNA, 766 bp, Helicoverpa zea
  source 1..766: mol_type = genomic DNA
tgatttcgaattccatcgttcattccaagatgttcaatcaaactcagttgtttgtttttctcgctgtattcactacgagcagtgttttagggaataacaatgatgttaaggatggcgcagcgagtggagctcacagcgaccgactaggtctttggttcggtccccggctaggcaagcgctcgctcagaatatctaccgaagataacagacaagcattcttcaaattactcgaagccgccgacgctttgaaatactattacgaccagctaccttatgagatgcaagctgatgaacctgaaaccagggtcaccaagaaggtgatcttcacccccaagttaggcagaagcctcgcatacgatgacaaaagctttgagaacgtggagttcacgcccagactcggcaggagactgtccgatgatatgcctgccacccccgctgaccaggaaatgtaccgccaagaccctgaacagattgacagcaggacaaagtacttctccccaaggctcggcagaaccatgaacttctcaccacgactcggcagggaactgtcttatgatatgatgccaaataaaatcagggtagtcaggagtacaaacaaaacgcgatcaacataatttggagcaaaaacaagacgcaaagctagtctaacctcaaaatttttataaaacgtgttattttggacgaaataatgtactgttttgtataataagtattattaaataatattaaaaattagtattttgtcgaaataaaggacttaagatat

SEQ ID NO: 267 - DNA, 3468 bp, Bacillus thuringiensis
  source 1..3468: mol_type = genomic DNA
atggataacaatccgaacatcaatgaatgcattccttataattgtttaagtaaccctgaagtagaagtattaggtggagaaagaatagaaactggttacaccccaatcgatatttccttgtcgctaacgcaatttcttttgagtgaatttgttcccggtgctggatttgtgttaggactagttgatataatatggggaatttttggtccctctcaatgggacgcatttcttgtacaaattgaacagttaattaaccaaagaatagaagaattcgctaggaaccaagccatttctagattagaaggactaagcaatctttatcaaatttacgcagaatcttttagagagtgggaagcagatcctactaatccagcattaagagaagagatgcgtattcaattcaatgacatgaacagtgcccttacaaccgctattcctctttttgcagttcaaaattatcaagttcctcttttatcagtatatgttcaagctgcaaatttacatttatcagttttgagagatgtttcagtgtttggacaaaggtggggatttgatgccgcgactatcaatagtcgttataatgatttaactaggcttattggcaactatacagatcatgctgtacgctggtacaatacgggattagagcgtgtatggggaccggattctagagattggataagatataatcaatttagaagagaattaacactaactgtattagatatcgtttctctatttccgaactatgatagtagaacgtatccaattcgaacagtttcccaattaacaagagaaatttatacaaacccagtattagaaaattttgatggtagttttcgaggctcggctcagggcatagaaggaagtattaggagtccacatttgatggatatacttaacagtataaccatctatacggatgctcatagaggagaatattattggtcagggcatcaaataatggcttctcctgtagggttttcggggccagaattcacttttccgctatatggaactatgggaaatgcagctccacaacaacgtattgttgctcaactaggtcagggcgtgtatagaacattatcgtccactttatatagaagaccttttaatatagggataaataatcaacaactatctgttcttgacgggacagaatttgcttatggaacctcctcaaatttgccatccgctgtatacagaaaaagcggaacggtagattcgctggatgaaataccgccacagaataacaacgtgccacctaggcaaggatttagtcatcgattaagccatgtttcaatgtttcgttcaggctttagtaatagtagtgtaagtataataagagctcctatgttctcttggatacatcgtagtgctgaatttaataatataattccttcatcacaaattacacaaatacctttaacaaaatctactaatcttggctctggaacttctgtcgttaaaggaccaggatttacaggaggagatattcttcgaagaacttcacctggccagatttcaaccttaagagtaaatattactgcaccattatcacaaagatatcgggtaagaattcgctacgcttctaccacaaatttacaattccatacatcaattgacggaagacctattaatcaggggaatttttcagcaactatgagtagtgggagtaatttacagtccggaagctttaggactgtaggttttactactccgtttaacttttcaaatggatcaagtgtatttacgttaagtgctcatgtcttcaattcaggcaatgaagtttatatagatcgaattgaatttgttccggcagaagtaacctttgaggcagaatatgatttagaaagagcacaaaaggcggtgaatgagctgtttacttcttccaatcaaatcgggttaaaaacagatgtgacggattatcatattgatcaagtatccaatttagttgagtgtttatctgatgaattttgtctggatgaaaaaaaagaattgtccgagaaagtcaaacatgcgaagcgacttagtgatgagcggaatttacttcaagatccaaactttagagggatcaatagacaactagaccgtggctggagaggaagtacggatattaccatccaaggaggcgatgacgtattcaaagagaattacgttacgctattgggtacctttgatgagtgctatccaacgtatttatatcaaaaaatagatgagtcgaaattaaaagcctatacccgttaccaattaagagggtatatcgaagatagtcaagacttagaaatctatttaattcgctacaatgccaaacacgaaacagtaaatgtgccaggtacgggttccttatggccgctttcagccccaagtccaatcggaaaatgtgcccatcattcccatcatttctccttggacattgatgttggatgtacagacttaaatgaggacttaggtgtatgggtgatattcaagattaagacgcaagatggccatgcaagactaggaaatctagaatttctcgaagagaaaccattagtaggagaagcactagctcgtgtgaaaagagcggagaaaaaatggagagacaaacgtgaaaaattggaatgggaaacaaatattgtttataaagaggcaaaagaatctgtagatgctttatttgtaaactctcaatatgatagattacaagcggataccaacatcgcgatgattcatgcggcagataaacgcgttcatagcattcgagaagcttatctgcctgagctgtctgtgattccgggtgtcaatgcggctatttttgaagaattagaagggcgtattttcactgcattctccctatatgatgcgagaaatgtcattaaaaatggtgattttaataatggcttatcctgctggaacgtgaaagggcatgtagatgtagaagaacaaaacaaccaccgttcggtccttgttgttccggaatgggaagcagaagtgtcacaagaagttcgtgtctgtccgggtcgtggctatatccttcgtgtcacagcgtacaaggagggatatggagaaggttgcgtaaccattcatgagatcgagaacaatacagacgaactgaagtttagcaactgtgtagaagaggaagtatatccaaacaacacggtaacgtgtaatgattatactgcgactcaagaagaatatgagggtacgtacacttctcgtaatcgaggatatgacggagcctatgaaagcaattcttctgtaccagctgattatgcatcagcctatgaagaaaaagcatatacagatggacgaagagacaatccttgtgaatctaacagaggatatggggattacacaccactaccagctggctatgtgacaaaagaattagagtacttcccagaaaccgataaggtatggattgagatcggagaaacggaaggaacattcatcgtggacagcgtggaattacttctcatggaggaatag

SEQ ID NO: 268 - DNA, 3468 bp, Bacillus thuringiensis
  source 1..3468: mol_type = genomic DNA
atggataacaatccgaacatcaatgaatgcattccttataattgtttaagtaaccctgaagtagaagtattaggtggagaaagaatagagactggttacaccccaatcgatatttccttgtcgctaacgcaatttcttttgagtgaatttgttcccggtgctggatttgtgttaggactagttgatataatatggggaatttttggtccctctcaatgggacgcatttcttgtacaaattgaacagttaattaaccaaagaatagaagaattcgctaggaaccaagccatttctagattagaaggactaagcaatctttatcaaatttacgcagaatcttttagagagtgggaagcagatcctactaatccagcattaagagaagagatgcgtattcaattcaatgacatgaacagtgcccttacaaccgctattcctctttttgcagttcaaaattatcaagttcctcttttatcagtatatgttcaagctgcaaatttacatttaccagttttgagagatgtttcagtgtttggacaaaggtggggatttgatgccgcgactatcaatagtcgttataatgatttaactaggcttattggcaactatacagatcatgctgtacgctggtacaatacgggattagagcgtgtatggggaccggattctagagattggataagatataatcaatttagaagagaattaacactaactgtattagatatcgtttctctatttccgaactatgatagtagaacgtatccaattcgaacagtttcccaattaacaagagaaatttatacaaacccagtattagaaaattttgatggtagttttcgaggctcggctcagggcatagaaggaagtattaggagtccacatttgatggatatacttaacagtataaccatctatacggatgctcatagaggagaatattattggtcagggcatcaaataatggcttctcctgtagggttttcggggccagaattcacttttccgctatatggaactatgggaaatgcagctccacaacaacgtattgttgctcaactaggtcagggcgtgtatagaacattatcgtccactttatatagaagaccttttaatatagggataaataatcaacaactatctgttcttgacgggacagaatttgcttatggaacctcctcaaatttgccatccgctgtatacagaaaaagcggaacggtagattcgctggatgaaataccgccacagaataacaacgtgccacctaggcaaggatttagtcatcgattaagccatgtttcaatgtttcgttcaggctttagtaatagtagtgtaagtataataagagctcctatgttctcttggatacatcgtagtgctgaatttaataatataattccttcatcacaaattacacaaatacctttaacaaaatctactaatcttggctctggaacttctgtcgttaaaggaccaggatttacaggaggagatattcttcgaagaacttcacctggccagatttcaaccttaagagtaaatattactgcaccattatcacaaagatatcgggtaagaattcgctacgcttctaccacaaatttacaattccatacatcaattgacggaagacctattaatcaggggaatttttcagcaactatgagtagtgggagtaatttacagtccggaagctttaggactgtaggttttactactccgtttaacttttcaaatggatcaagtgtatttacgttaagtgctcatgtcttcaattcaggcaatgaagtttatatagatcgaattgaatttgttccggcagaagtaacctttgaggcagaatatgatttagaaagagcacaaaaggcggtgaatgagctgtttacttcttccaatcaaatcgggttaaaaacagatgtgacggattatcatattgatcaagtatccaatttagttgagtgtttatctgatgaattttgtctggatgaaaaaaaagaattgtccgagaaagtcaaacatgcgaagcgacttagtgatgagcggaatttacttcaagatccaaactttagagggatcaatagacaactagaccgtggctggagaggaagtacggatattaccatccaaggaggcgatgacgtattcaaagagaattacgttacgctattgggtacctttgatgagtgctatccaacgtatttatatcaaaaaatagatgagtcgaaattaaaagcctatacccgttaccaattaagagggtatatcgaagatagtcaagacatagaaatctatttaattcgctacaatgccaaacacgaaacagtaaatgtgccaggtacgggttccttatggccgctttcagccccaagtccaatcggaaaatgtgcccatcattcccatcatttctccttggacattgatgttggatgtacagacttaaatgaggacttaggtgtatgggtgatattcaagattaagacgcaagatggccatgcaagactaggaaatctagaatttctcgaagagaaaccattagtaggagaagcactagctcgtgtgaaaagagcggagaaaaaatggagaggcaaacgtgaaaaattggaatgggaaacaaatattgtttataaagaggcaaaagaatctgtagatgctttatttgtaaactctcaatatgatagattacaagcggataccaacatcgcgatgattcatgcggcagataaacgcgttcatagcattcgagaagcttatctgcctgagctgtctgtgattccgggtgtcaatgcggctatttttgaagaattagaagggcgtattttcactgcattctccctatatgatgcgagaaatgtcattaaaaatggtgattttaataatggcttatcctgctggaacgtgaaagggcatgtggatgtagaagaacaaaacaaccaccgttcggtccttgttgttccggaatgggaagcagaagtgtcacaagaagttcgtgtctgtccgggtcgtggctatatccttcgtgtcacagcgtacaaggagggatatggagaaggttgcgtaaccattcatgagatcgagaacaatacagacgaactgaagtttagcaactgtgtagaagaggaagtatatccaaacaacacggtaacgtgtaatgattatactgcgactcaagaagaatatgagggtacgtacacttctcgtaatcgaggatatgacggagcctatgaaagcaattcttctgtaccagctgattatgcatcagcctatgaagaaaaagcatatacagatggacgaagagacaatccttgtgaatctaacagaggatatggggattacacaccactaccagctggctatgtgacaaaagaattagagtacttcccagaaaccgataaggtatggattgagatcggagaaacggaaggaacattcattgtggatagcgtggaattacttcttatggaggaataa

SEQ ID NO: 269 - DNA, 3687 bp, Bacillus thuringiensis
  source 1..3687: mol_type = genomic DNA
atgacttcaaataggaaaaatgagaatgaaattataaatgctgtatcgaatcattccgcacaaatggatctattaccagatgctcgtattgaggatagcttgtgtatagccgaggggaacaatatcgatccatttgttagcgcatcaacagtccaaacgggtattaacatagctggtagaatactaggcgtattgggcgtaccgtttgctggacaactagctagtttttatagttttcttgttggtgaattatggccccgcggcagagatcagtgggaaattttcctagaacatgtcgaacaacttataaatcaacaaataacagaaaatgctaggaatacggctcttgctcgattacaaggtttaggagattccttcagagcctatcaacagtcacttgaagattggctagaaaaccgtgatgatgcaagaacgagaagtgttctttatacccaatatatagctttagaacttgattttcttaatgcgatgccgcttttcgcaattagaaaccaagaagttccattattgatggtatatgctcaagctgcaaatttacacctattattattgagagatgcctctctttttggtagtgaatttgggcttacatcgcaggaaattcaacgctattatgagcgccaagtggaacgaacgagagattattccgactattgcgtagaatggtataatacaggtctaaatagcttgagagggacaaatgccgcaagttgggtacggtataatcaattccgtagaggtctaacgttaggagtattaggtctagtggcactattcccaagctatgacactcgcacttatccaataaatacgagtgctcagttaacaagagaagtttatacagacgcaattggagcaacaggggtaaatatggcaagtatgaattggtataataataatgcaccttcgttctctgccatagaggctgcggctatccgaagcccgcatctacttgattttctagaacaacttacaatttttagcgcttcatcacgatggagtaatactaggcatatgacttattggcgggggcacacgattcaatctcggccaataggaggcggattaaatacctcaacgcatggggctaccaatacttctattaatcctgtaacattacggttcgcatctcgagacgtttataggactgaatcatatgcaggagtgcttctatggggaatttaccttgaacctattcatggtgtccctactgttaggtttaattttacgaaccctcagaatatttctgatagaggtaccgctaactatagtcaaccttatgagtcacctgggcttcaattaaaagattcagaaactgaattaccaccagaaacaacagaacgaccaaattatgaatcttacagtcacaggttatctcatataggtataattttacaatccagggtgaatgtaccggtatattcttggacgcatcgtagtgcagatcgtacgaatacgattggaccaaatagaatcacccaaatcccaatggtaaaagcatccgaacttcctcaaggtaccactgttgttagaggaccaggatttactggtggggatattcttcgaagaacgaatactggtggatttggaccgataagagtaactgttaacggaccattaacacaaagatatcgtataggattccgctatgcttcaactgtagattttgatttctttgcatcacgtggaggtactactgtaaataattttagattcctacgtacaatgaacagtggagacgaactaaaatacggaaattttgtgagacgtgcttttactacaccttttacttttacacaaattcaaaatataattcgaacgtctattcaaggccttagtggaaatggggaagtgtatatagataaaattgaaattattccagttactgcaaccttcgaagcagaatatgatttagaaagagcgcaagaggcggtgaatgctctgtttactaatacgaatccaagaagattgaaaacagatgtgacagattatcatattgatcaagtatccaatttagtggcgtgtctatcggatgaattctgcttggatgaaaagagagaattacttgagaaagtgaaatatgcgaaacgactcagtgatgaaagaaacttactccaagatccaaacttcacatccatcaataagcaaccagacttcatatctactaatgagcaatcgaatttcacatctatccatgaacaatctgaacatggatggtggggaagtgagaacattaccatccaggaaggaaatgacgtatctaaagagaattacgtcacactaccgggtacttttaatgagtgttatccgacgtatttatatcaaaaaataggggagtcggaattaaaagcttatactcgctaccaattagaaggttatattgaagatagtcaagatttagagatatatttgattcgttataatgcgaaacatgaaacattggatgttccaggtaccgagtccctatggccgctttcagttgaaagcccaatcggaaggtgcggagaaccgaatcgatgcgcaccacattttgaatggaatcctgatctagattgttcctgcagagatggagaaaaatgtgcgcatcattcccatcatttctctttggatattgatgttggatgcacagacttgcatgagaatctaggcgtgtgggtggtattcaagattaagacgcaggaaggtcatgcaagactagggaatctggaatttattgaagagaaaccattattaggagaagcactgtctcgtgtgaagagggcagagaaaaaatggagagacaaacgtgaaaaactacaattggaaacaaaacgagtatatacagaggcaaaagaagctgtggatgctttattcgtagattctcaatatgatagattacaagcggatacaaacatcggcatgattcatgcggcagataaacttgttcatcgaattcgagaggcgtatctttcagaattacctgttatcccaggtgtaaatgcggaaatttttgaagaattagaaggtcacattatcactgcaatctccttatacgatgcgagaaatgtcgttaaaaatggtgattttaataatggattaacatgttggaatgtaaaagggcatgtagatgtacaacagagccatcatcgttctgaccttgttatcccagaatgggaagcagaagtgtcacaagcagttcgcgtctgtccggggtgtggctatatccttagtgtcacagcgtacaaagagggatatggagagggctgcgtaacgatccatgaaatcgagaacaatacagacgaactaaaatttaaaaaccgtgaagaagaggaagtgtatccaacggatacaggaacgtgtaatgattatactgcacaccaaggtacagctggatgcgcagatgcatgtaattcccgtaatgctggatatgaggatgcatatgaagttgatactacagcatctgttaattacaaaccgacttatgaagaagaaacgtatacagatgtaagaagagataatcattgtgaatatgacagagggtatgtcaattatccaccagtaccagctggttatgtgacaaaagaattagaatacttcccagaaacagatacagtatggattgagattggagaaacggaaggaaagtttatggtagatagcgtggaattactcctcatggaagaatag

SEQ ID NO: 270 - DNA, 3531 bp, Bacillus thuringiensis
  source 1..3531: mol_type = genomic DNA
atggagaataatattcaaaatcaatgcgtaccttacaattgtttaagtaatcctgaggagatacttttagatggagaaagaatatcaactggtaattcatcaattgatatctctctgtcacttgtccagcttctggtatctaactttgtaccagggggaggatttttagttggattattagattttgtatggggaatagtaggcccttctccatgggatgcatttctagtgcaaattgaacaattaattaatgaaagaatagctgcatatgctaggtctgcagcaatttctaatttagaaggattaggaaacaatttcaatatatatgtggaagcatttaaagaatgggaagcagatcctgataatccagtaaccaggactagagtagttgatcgctttcgtatacttgatgggctacttgaaagggacatcccttcatttcgaattgctggatttgaagtaccccttttatccgtttatgctcaagcggccaatttgcatctagctatattaagagattcttcaatttttggagcaagatggggattgacaacaataaatgtcaatgaaaactataataggctaattaggcatattgatgaatatgctaatcactgtgcagatacgtataatcggggataaaataatttaccaaaatctacgtatcaagattggataacatataatcgattacggagagacttaacattaactgtattagatatcgctgctttctttccaagctatgacaataggagatatccaattcagtcagttggtcaactaacaagggaaatttatacggacccattaattacttttaatccacagttacagtctgtagctcaattacctacttttaacgttatggaaagcaacgcaattagaactcctcatttatttgatgtattgaataatcttacaatttttacagattggtttagtgttggacgcaacttttattggggaggacatcgagtaatatctaaccgtataggaggaggtaacataacatctcctatatatggaagagaggcgaatcaggagcctccaagatcttttacttttaatgggcctgtttttaggactttatcaaatcctacttttagacctttacagcaaccttggccagcgccaccatttaatttacgtggtgttgaaggagtagaattttctacacctttaaatagctttacgtatcgaggaagaggtacggttgattctttaactgagttaccgcctgaggataatagtgtgcctcctcgcgaaggatatagtcatcgtttatgtcatgcaacttttgttcaaagatctggaaccccatttttaacaactggtccagtattttcttggacgcatcgtagtgctactgatcgaaatataatctacccggatgtaattaaccaaataccgttagtaaaagcattcaaccttacttcaggtacctctgtagtcagaggtccaggatttacaggaggggatatcatccgaactaacgttaatggtagtgtactaagtatgagtcttaattttagtaacacaacattacagcagtatcgtgtgtgagttcgttatgctgcttctcaaacaatggtcatgagcgtaactgttggagggagtactactggtaatcaaggattccctagtactatgagtgcaaatggggctttgacatctcaatcatttagattcgcagaatttcctgtaggtattagtgcatctggcagtcaaggtgcatcaataagtattagtaataatgtaggtagacaaatgtttcacttagatagaattgaatttctcccagttacttctacatttgaggaggaatatgatttagaaagagcgcaagaggcggtgaatgccctgtttacttctacgaaccaactagggctaaaaacagatgtaacggattatcatattgatcaagtatcaaatctagttgaatgcttatcggatgaattttgtctggatgaaaagcgagaattgtctgagaaagtcaaacatgcgaagcgactcagcgatgagcgcaatttactccaggatcgaaatttcagatccattaatgggcaactaggccgtggctggagaggaagtacggatattaccatccaaggtggagatgacgtattcaaagagaattacgtcacactgccgggtacctttgatgagtgctatccaacgtatctatatcaaaaaatagatgaatcgaaattaaaatcctatacacgttacgagttaagagggtatatcgaggatagtcaagatttagaaatctatttgattcgctacaatgcaaaacacgaaatagtaaatgtaccaggtacagggagtttatggcctctttctatagaaaattcaattgggccttgtggagaaccgaatcgctgcgcgccacaccttgaatggaatcctaatctagattgttcctgcagggacggggaaaaatgtgcccatcattcccatcatttctccttggacattgatgttggatgtacagacttaaatgaggacttaggtgtatgggtgatcttcaagattaagacgcaagatggccatgcaagactaggaaatctagagtttctcgaagagaaaccactattaggggaagcactagctcgtgtgaaaagagcggagaagaaatggagagacaaacgtgaaaaattggaatgggaaacaaatattgtttataaagaggcaaaagaatctgtagatgctttatttgtgaactctcaatatgatagattacaagcggatacgaatatcgcgatgattcatgcggcagataaacgcgttcatagaattagagaagcataccttccagaattatctgtaattccgggtgtaaatgcgggcattttcgaagaattagagggacgcattttcacagcctactctctatatgatgcgagaaatgtcattaaaaatggcgatttcaataatggtttattatgctggaacttgaaagggcatgtagatgtagaagaacaaaacaaccatcgttcagtccttgttgtcccggaatgggaagcggaggtgtcccaagaagttcgtgtctgtccaggtcgtggctatatccttcgtgttacagcgtacaaagagggatatggagagggctgcgtaaccattcatgagatcgaagacaatacagacgaactgaaatttagcaactgtgttgaagaggaagtatatccaaacaacacggtaacgtgtaatgattatactgcgactcaagaagaatacgggggtgcgtacacttcccgtaatcatggatatggcaaatcttatgaaagtaattcttccgtacaagctgattatgcgtcagtttatgaagaaaaagcggacacagatggacgaagagataatcattgcgaatctaacagagggtatggggattacacgccactaccagctggttatgtaacaaaagaattagaatacttcccagaaaccgataaggtatgggttgagattggagaaacggaaggaacattcattgtggatagtgtggaattactccttatggaggaataa

SEQ ID NO: 271 - DNA, 8373 bp, Bacillus thuringiensis
  source 1..8373: mol_type = genomic DNA
tgaaaaataaatttattatttgagaaataaaatcacttgaactcttgtcgcaaatgctaaagcctgagaattggatactatcagaaaacatgcaaatgaaaggtgaaggactcatagagattttgggaaatagttattttaaacaattcattaaattggaagatgattcaacctattttctaagactatctttcaagggaacaggtagggtacccatgattgatgaatctagttatttagttttcgcaaatgttaaggatgaaaattttactagagttattaaaaaatttgtcttcaaagggtgagtgttttattggtatttatggtacctatgtagaaaatgcaagtattatttttctaatgtatttattgttaaagagtagaaaagatataatatttaattatacaaaaattaatagaataccttttgaaagtaatattattccaaaaggaaaaagtttttttatttgtacacgctgataaaagaaagatttcttataatattgcattcagttatcatcgagataaacttgaatcattacttttagaaaagttagctccccggtccttattctccatgtaattaaggtcttgaactatccccactttcacttcgtttagaagtgagggattcctaagtaaagagttctatcgaactctaattgattaggctaaccccgcagtccttgcggttagaagccttattgcttcattctttagattgatactcgcgttaatatccctatcatggtttgtacgacaagaaggacagtcccattcacgtaggtttagatttttaacgtctttattttgatatccacaacaagaacgtaattggctggaagcaaatgttttcgatacgacaatgacttgtttgccataccattttgctttgtattctaacatgaatcgaaattgcgaccaagatacctcaataattgcttttgctaacttatgattttttaacatattcgatacttgcaaatcctctataccgataacatcgtggtttttgatgatttcagttgaaattttgtccaagtaatcttttctagtatttgatatgaattctagctatctttactctttgtttattccagcgagaagatcctttcattcttctagaaagaacacgctgtgttttcggaagttcttgtacttctgtttcaactaatagtgacacaaaatatctaccagaaggggttcgtctaacagtcgcatttacaatacgcccctctacttcgcgacttttagcaaatcgaacaaggcctagtttcggtaactttattttgttccctacaacggcaatgttttcatttgtttgttttgtggtataagattgtacgttgttcttcttagatttaaaacgcggtgcgctgttttgttttttgaaaagcgtgtataagcatccgcaaggttgcgaacagacgactgaatcgcaatactatccacttcttttagccaaacaagctctttcttcatggcaggtagtttggcagagaatgtaccataggtcaagccttttcctgtctctttgtatacttgatcccataaggataggaaatgattgaatacaaagcgagaacacccaatcgttttgttgattagaattgcttgtgcctgatttggatagatacgaaacttataggctttattcatcattatgtaattcacctccatttcggtatatgactattatacaccgaacatacattcgatagatagtggagtaacactttctgtatatctaacaattaagatggcttcctgccatcccttgttcgaattcatctcccacctactcactgggctgtggcccttcacgctccttgaggaaggagtcttcttggctaaaataataaatagatctgttttaatataagggatttgtgcccttctcgttatattcttttattagccccaaaaactagtgcaactaaatatttttataattacactgattaaatactttatttttgggagtaagatttatgctgaaatgtaataaaattcgttccattttctgtattttctcataaaatgtttcatatgctttaaattgtagtaaagaaaaacagtacaaacttaaaaggactttagtaatttaataaaaaaaggggatagtttatggaaataaataatcaaaaccaatgtgtgccttacaattgtttaagtaatcctaaggagataatattaggcgaggaaaggctagaaacagggaatactgtagcagacatttcattagggcttattaattttctatattctaattttgtaccaggaggaggatttatagtaggtttactagaattaatatggggatttatagggccttcgcaatgggatatttttttagctcaaattgagcaattgattagtcaaagaatagaagaatttgctaggaatcaggcaatttcaagattggaggggctaagcaatctttataaggtctatgttagagcgtttagcgactgggagaaagatcctactaatcctgctttaagggaagaaatgcgtatacaatttaatgacatgaatagtgctctcataacggctattccactttttagagttcaaaattatgaagttgctcttttatctgtatatgttcaagccgcaaacttacatttatctattttaagggatgtttcagttttcggagaaagatggggatatgatacagcgactatcaataatcgctatagtgatctgactagccttattcatgtttatactaaccattgtgtggatacgtataatcagggattaaggcgtttggaaggtcgttttcttagcgattggattgtatataatcgtttccggagacaattgacaatttcagtattagatattgttgcgttttttccaaattatgatattagaacatatccaattcaaacagctactcagctaacgagggaagtctatctggatttaccttttattaatgaaaatctttctcctgcagcaagctatccaaccttttcagctgctgaaagtgctataattagaagtcctcatttagtagactttttaaatagctttaccatttatacagatagtctggcacgttatgcatattggggagggcacttggtaaattctttccgcacaggaaccactactaatttgataagatcccctttatatggaagggaaggaaatacagagcgccccgtaactattaccgcatcacctagcgtaccaatatttagaacactttcatatattacaggccttgacaattcaaatcctgtagctggaatcgagggagtggaattccaaaatactataagtagaagtatctatcgtaaaagcggtccaatagattcttttagtgaattaccacctcaagatgccagcgtatctcctgcaattgggtatagtcaccgtttatgccatgcaacatttttagaacggattagtggaccaagaatagcaggcaccgtattttcttggacacaccgtagtgccagccctactaatgaagtaagtccatctagaattacacaaattccatgggtaaaggcgcatactcttgcatctggtgcctccgtcattaaaggtcctggatttacaggtggagatattctgactaggaatagtatgggcgagctggggaccttacgagtaaccttcacaggaagattaccacaaagttattatatacgtttccgttatgcttcggtagcaaataggagtggtacatttagatattcacagccaccttcgtatggaatttcatttccaaaaactatggacgcaggtgaaccactaacatctcgttcgttcgctcatacaacactcttcactccaataaccttttcacgagctcaagaagaatttgatctatacatccaatcgggtgtttatatagatcgaattgaatttataccggttactgcaacatttgaggcagaatatgatttagaaagagcgcaaaaggtggtgaatgccctgtttacgtctacaaaccaactagggctaaaaacagatgtgacggattatcatattgatcaggtatccaatctagttgcgtgtttatcggatgaattttgtctggatgaaaagagagaattgtccgagaaagttaaacatgcaaagcgactcagtgatgagcggaatttacttcaagatccaaacttcagagggatcaataggcaaccagaccgtggctggagaggaagtacggatattactatccaaggaggagatgacgtattcaaagagaattacgttacgctaccgggtacctttgatgagtgctatccaacgtatttatatcaaaaaatagatgagtcgaaattaaaagcctatacccgttatcaattaagagggtatatcgaagatagtcaagacttagaaatctatttaattcgttacaatgcaaaacacgaaatagtaaatgtaccaggtacaggaagtttatggcctctttctgtagaaaatcaaattggaccttgtggagaaccgaatcgatgcgcgccacaccttgaatggaatcctgatttacactgttcctgcagagacggggaaaaatgtgcacatcattctcatcatttctctttggacattgatgttggatgtacagacttaaatgaggacttaggtgtatgggtgatattcaagattaagacgcaagatggccacgcacgactagggaatctagagtttctcgaagagaaaccattattaggagaagcactagctcgtgtgaaaagagcggagaaaaaatggagagacaaacgcgaaacattacaattggaaacaactatcgtttataaagaggcaaaagaatctgtagatgctttatttgtaaactctcaatatgatagattacaagcggatacgaacatcgcgatgattcatgcggcagataaacgcgttcatagaattcgagaagcgtatctgccggagctgtctgtgattccgggtgtcaatgcggctatttttgaagaattagaagagcgtattttcactgcattttccctatatgatgcgagaaatattattaaaaatggcgatttcaataatggcttattatgctggaacgtgaaagggcatgtagaggtagaagaacaaaacaatcaccgttcagtcctggttatcccagaatgggaggcagaagtgtcacaagaggttcgtgtctgtccaggtcgtggctatatccttcgtgttacagcgtacaaagagggatatggagaaggttgcgtaacgatccatgagatcgagaacaatacagacgaactgaaattcaacaactgtgtagaagaggaagtatatccaaacaacacggtaacgtgtattaattatactgcgactcaagaagaatatgagggtacgtacacttctcgtaatcgaggatatgacgaagcctatggtaataacccttccgtaccagctgattatgcgtcagtctatgaagaaaaatcgtatacagatagacgaagagagaatccttgtgaatctaacagaggatatggagattacacaccactaccagctggttatgtaacaaaggaattagagtacttcccagagaccgataaggtatggattgagattggagaaacagaaggaacattcatcgtggacagcgtggaattactccttatggaggaataggaccatcccgagtatagcagttttaataaatattaattaaaatagtagtctaacttccgttccaattaaataagtaaattacagttgtaaaaaaaaacggacattactcttcaaagagcgatgtccgttttttatatggtgtgtgctaatgataagtgcgcacgaaattttattgtcaaaatagtatttacttgagaaaaagatcatgttatgtagagatattcccttataatacttgttccacattcataatttttggatgatacattacaacaaaaacagtcgcaaatttatattttctgcataaaatatatagttaagaacctaagaagagaatcaagtagtaggataaaactgaataaggaagtgtagctacaatgaataaaaaaataagaaatgaagatgagcattcatcgatagaattatcatatagtaattcaaaaaatcaaaagcataaggtaccattttgttgtaccatttcaattcctaaaggatgggaagttatatcagaatgccagcccaaaatcgtctatcaacttgattgtctgtctattataaaagaaacgtgtcgcaaagtggttgaggtaaaagattgtggtcaaacggaaatcgatgttaatgtgttaaaaataaaaggatgtatctcttttctgattaatatagaggtgaggccaaaggatgaacgatgtgtttgcttcacagattcccaaaatcaagacatagcattgtgttgtaaagataccgtatgtgtagatcatgtacttcaatgtagtgtggggcatttaccacctcttcatttaaattgtcacaatgtaacagtctgtgatgtaaaagtggtaccggtctgcgatgcggcctgtcaattcgtgaaagtgacagggggttttcaatttcatcctcacttttaaatatcgaggttccgactcccttgtatattgatgattttctcataaaaagtgactataaatataatgttaaagtttgtatatttaatatatttgcagtgggaatggaaaaggggggctttatcatcctttatagcttgtggaaagaggcgaatttaatgggaaattggtttttatttgaagtcctcgatatatgaaacccttcatgtgaatttttaaaaccgtaaccacatttaagaaaaagaaaaatgtttaaactttcatcactataacattaatatttaaatgaagtgggatatattatgcgaaacttcagatagagatagaaaatgaataactaaaaaaattcttacaagatatcattattttaatttgattattgtttctattctgcttattttatgttaaatttaatatgtacatgtaaaatggtttgaaatttagtatgattacatgcaggaaaagagtacgttcgaaaaagaacgtactcttttatatttaccttgattatcttaaaaatataatcatcatttttattaggtataaatttgatatgaaacacatacattcttaaaagtacttgttttttaatagagcaatatagtttgaactatttatttacggtatataaagctgcacgcctacactatacaggatgtatgaaaaaagttttaaaatccacagatatagcaaagtgctcatttgccatatctgtggattttaaaacataggttatgttacaaaaacattataagagattaaccgtcaaagatgtgaaccagatataagccagctagtttttttacgaatgtagtatacccaaacaatttataagacatatgtatacaaaccttaaattcaaagatttattctcaggaactctaaagtatggatgaaagagaaataagccctggttatttaaacggtgaaggaagttcaatatgataaaggaaaatatcagattagaggctctacacaactaaaaaatttggtgaaaaaatataaagaatttagtggaattacagatacttgtgggaaaaatggtggaatgaaaggtgtatcaaattggttaaaagagaaatatccagttatatggtttacgaaatttgcgggtgtacatcgttgaagtattcataccaaaggtatgaaaaatatacggctagaactcgaaaaatgattaaaaaagtaagatctattcacgtaaagcacaaagaatttggttatccacatatgaaaatccctttacaggaagagggatattttataaatcacaagaaagtatatcgcttaaagatggggctaaacatccaatctattattcgaaagaagcgttgcttctttaaagggaactattccaaattttttctgaatgttttaaatcgtgagtttaaagatcgccaacaaaatgaggcacttgttacagatattacttacctacaattccaagaggaatttcggtatctttctgttgtacaaggtgtttataataacgcaggtgtttcttggaaaatatctacgcgtaatgataatgaacttgtattagatacgattgaaatattggcacaaaaaagagacgtgcgtggaaccattctccattcagatcaaggattccagtacacatctcatgcctacaacaaacgactttccgatttaagtatcattggtaactactcccgcaaaggaaactgccataataacgtttgtatcgagtcatttttctcccatttcaaatcggagatgttgtatttgaatcattttaaaacagaagaaaatttaatacaagccaatgaaaaatatatttacttttataactatagacggttcaaaaaacgactcaaccatc

SEQ ID NO: 272 - DNA, 3516 bp, Bacillus thuringiensis
  source 1..3516: mol_type = genomic DNA
atggagatagtgaataatcagaatcaatgcgtgccttataattgtttaaataatcctgaaaatgagatattagatattgaaaggtcaaatagtactgtagcaacaaacatcgccttggagattagtcgtctgctcgcttccgcaactccaataggggggattttattaggattgtttgatgcaatatgggggtctataggcccttcacaatgggatttatttttagagcaaattgagctattgattgaccaaaaaatagaggaattcgctagaaaccaggcaatttctagattagaagggataagcagtctgtacggaatttatacagaagcttttagagagtgggaagcagatcctactaatccagcattaaaagaagagatgcgtactcaatttaatgacatgaacagtattcttgtaacagctattcctcttttttcagttcaaaattatcaagtcccatttttatcagtatatgttcaagctgcaaatttacatttatcggttttgagagatgtttcagtgtttgggcaggcttggggatttgatatagcaacaataaatagtcgttataatgatctgactagacttattcctatatatacagattatgctgtacgctggtacaatacgggattagatcgcttaccacgaactggtgggctgcgaaactgggcaagatttaatcagtttagaagagagttaacaatatcagtattagatattatttcttttttcagaaattacgattctagattatatccaattccaacaagctcccaattaacgcgggaagtatatacagatccggtaattaatataactgactatagagttggccccagcttcgagaatattgagaactcagccattagaagcccccaccttatggacttcttaaataatttgaccattgatacggatttgattagaggtgttcactattgggcagggcatcgtgtaacttctcattttacaggtagttctcaagtgataacaacccctcaatatgggataaccgcaaatgcggaaccaagacgaactattgctcctagtacttttccaggtcttaacctattttatagaacattatcaaatcctttcttccgaagatcagaaaatattactcctaccttagggataaatgtagtacagggagtagggttcattcaaccaaataatgctgaagttctatatagaagtagggggacagtagattctcttaatgagttaccaattgatggtgagaattcattagttggatatagtcatcgattaagtcatgttacactaaccaggtcgttatataatactaatataactagcctgccaacatttgtttggacacatcacagtgctactaatacaaatacaattaatccagatattattacacaaatacctttagtgaaaggatttagacttggtggtggcacctctgtcattaaaggaccaggatttacaggaggggatatccttcgaagaaataccattggtgagtttgtgtctttacaagtcaatattaactcaccaattacccaaagataccgtttaagatttcgttatgcttccagtagggatgcacgaattactgtagcgataggaggacaaattagagtagatatgacccttgaaaaaaccatggaaattggggagagcttaacatctagaacatttagctataccaattttagtaatcctttttcatttagggctaatccagatataattagaatagctgaagaacttcctattcgtggtggtgagctttatatagataaaattgaacttattctagcagatgcaacatttgaagaagaatatgatttggaaagagcacagaaggcggtgaatgccctgtttacttctacaaatcaactagggctaaaaacagatgtgacggattatcatattgatcaagtttccaatttagttgagtgtttatcggatgaattttgtctggatgaaaagagagaattatccgagaaagtcaaacatgcgaagcgactcagtgatgaacggaatttacttcaagatccaaacttcagagggatcaataggcaaccagaccgtggctggagaggaagcacggatattactatccaaggtggagatgacgtattcaaagagaattacgtcacattaccgggtacctttgatgagtgctatccaacgtatttatatcaaaaaatagatgagtcgaagttaaaagcttatacccgctatgaattaagagggtatatcgaggatagtcaagacttagaaatctatttaattcgctacaatgcaaaacacgagacagtaaacgtgccaggtacgggttccttatggccgctttcagcccaaagtccaatcggaaagtgtggagaaccgaatcgatgcgcgccacaccttgaatggaatcctaatctagattgctcctgcagagacggggaaaaatgtgcccatcattcccatcatttctccttggacattgatgttggatgtacagacttaaatgaggacttaggtgtatgggtgatattcaagattaagacacaagatggctatgcaagactaggaaatctagagtttctcgaagagaaaccactattaggggaagcactagctcgtgtgaaaagagcggagaaaaaatggagagacaaatgcgaaaaattggaatgggaaacaaatattgtttataaagaggcaaaagaatctgtagatgctttatttgtaaactctcaatatgatagattacaagcggatacgaatatcgcgatgattcatgcggcagataaacgcgttcatagcattcgagaagcgtatctgccagagctgtctgtgattccgggtgtcaatgcggctatttttgaagaattagaagggcgtattttcactgcattctccctatatgatgcgagaaatgtcattaaaaatggcgatttcaataatggcttatcatgctggaacgtgaaagggcatgtagatgtagaagaacagaacaaccatcgttcggtccttgttgttccagaatgggaagcagaagtgtcacaagaagttcgtgtttgtccgggtcgtggctatatccttcgtgttacagcgtacaaagagggatatggagagggctgtgtaacgattcatgagatcgaagacaatacagacgaactgaaattcagcaactgtgtagaagaggaagtatatccaaacaacacggtaacgtgtaataattatactgcgactcaagaagaacatgagggtacgtacacttcccgtaatcgaggatatgacgaagcctatgaaagcaattcttctgtacatgcgtcagtctatgaagaaaaatcgtatacagatagacgaagagagaatccttgtgaatctaacagaggatatggggattacacaccactaccagctggctatgtgacaaaagaattagagtacttcccagaaaccgataaggtatggattgagatcggagaaacggaaggaacattcatcgtggacagcgtggaattacttcttatggaggaataa

SEQ ID NO: 273 - DNA, 3525 bp, Bacillus thuringiensis
  source 1..3525: mol_type = genomic DNA
atggagaataatattcaaaatcaatgcgtaccttacaattgtttaagtaatcctgaagtagaaatattaagtgaagaaagaagtactggcagattaccgttagatatatccttgtcgcttacacgtttccttttgagtgaatttgttccaggtgtgggagttgcgtttggattatttgatttaatatggggttttataactccttctgaatggagtttatttcttttacagattgaacaactgattgaacaaagaattgaaacattggaaaggaaccgggcaattactacattacgagggttagcggatagctatgaagtttaccttgaggcactaagagagtgggaagaaaatcctaataatgcacaattaagggaagatgtgcgtattcgatttgctaatacagacgacgctttaataacagcaataaataattttacacttacaagttttgaaatccctcttttatcggtctatgttcaagcggcgaatctacatttatcactattaagagatgctgtatcgtttgggcagggttgggggctggatatagctactgttaataatcattataataggttaataaatcttattcatagatatacggaacattgtttggacacatacaatcaaggattagaaaacttaagaggtactaatactcgacaatggtcaagattcaatcagtttaggagagagttaacattgactgtattagatatcgttgctctttttccgaactacgatgctggagcatatccaattcaaacgtcatcccaattaacaagggaaatttatacaagttcagtaattgaagattctccagtttctgctaatatacctaatggttttaatagagcggaatttggagttagaccgccccatcttatggactttatgaattctttgtttgtaactgcagagactgttagaagtcaaactgtgtggggaggacacttagttagttcacgaaatacggctggtaaccctataaatttccctatttatgggatcttcaatcctggtggcgccatttggattgcagatgaggatccacgtcctttttatcggacattatcagatcctgtttttgtccgaggaggatttgggaatcctcattatgtacttgggcttaggggagtagcatttcaacaaactggtacgaaccacacccgaacatttagaaatagtgggaccatagattctctagatgaaatcccacctcaggataatagtggggcaccttggaatgattatagtcatgtattaaatcatgttacatttgtaaggtggcctggtgagattgcaggaagtgattcatggagagcgccaatgttttcttggacacaccgtagtgcagatcgtacaaatatcattaatccaaatataattacacaaatacctgctgtaaaagcacacaatcttcattcgggttctacggttgttagaggacccgggtttacaggtggtgatctcttacgaagaacgaatactggtacatttgcagatataagagtaaatattactgggccattatctcaaagatatcgtgtaagaattcgctatgcttctacgacagatttacaatttttcacgagaatcaatggaacttctgtaaatcaaggtaatttccaaagaactatgaatagagggggtaatttagagtctggaaactttaggactgcaggatttagtacgccttttagtttttcaaatgcgcaaagtacattcacattgggtactcaggctttttcaaatcaggaagtttatatagatcgaattgaatttgtcccggcagaagtaacattcgaggcagaatctgatttagaaagagcgcaaaaggcggtgaatgccctgtttacttctacaagccaactagggctaaaaacaaatgtaacgggttaccatattgatcaagtgtccaatttagttgcgtgtttatcggatgaattttgtctggatgaaaagagagaattgtccgagaaagttaaacatgcgaagcgactcagtgataagcggaatttacttcaagatccaaacttcagagggatcagtaggcaaccagaccatggctggagaggaagtacggatattactatccaaggaggagatgacgtattcaaagagaattacgttacgctaccgggtacttttgatgagtgctatccaacgtatttatatcaaaaaatagatgagtcgaaattaaaagcctatacccgttatcaattaagagggtatatcgaagatagtcaagacttagaaatctatttaattcgttacaattcaaaacacgaaatagtaaatgtaccaggtacagggagtttatggcctctttctgtagaaaatcaaattggaccttgtggagaaccgaatcgatgcgcgccacaccttgaatggaatcctgatttacactgttcctgcagagacggggaaaaatgtgtgcatcattctcatcatttctctttggacattgatgtcggatgtacagatttaaatgaggacctaggtgtatggttgatattcaagattaagacgcaagatggccacgcaagactagggaatctagagtttctcgaagaggaaccgttattaggcgaagcgttagcacgtgtgaagagagcggagaagaagtggagagacaaacgcgagaaactgcagttggaaacaaatattgtctataaagaggcaaaagaatctgtagatgctttatttgtaaactctcaatatgatagattacaagcggatacgaacatcgcgatgattcatgcggcagataaacgcgttcatagaatccgggaagcgtatctgccagagttgtctgtgattccaggtgtcaatgcggccattttcgaagaattagagggacgtatttttacagcgtattccttatatgatgcgagaaatgttattaaaaatggcaatttcaataatggcttattatgctggaacgtgaaagggcatgtagatgtagaagagcaaaacaaccaccgttcggtccttgttatcccagaatgggaagcagaagtgtcacaaaaagttcgtgtctgtccaggtcgtggttatatccttcgtgttacagcgtacaaagagggatatggagaaggtagcgtaacgatccatgagatcgaagacaatacagacgaattaaagtttagcaactgtgtagaagaaggatatccaaacaacacggtaacgtgtaatgagtatactatgaatcaaggggtaggagagtgtacggatgcatgtaatgtccgtaatcgtggatatgaggatgcatatggacacaatccttcaacgcctgttcattacacaacgccgtacgaagaagaaacgtatacagatgaacgaagagagaatccttgtgaagctaacaaagggtatgtgaattacacgccactaccagttggttatgtaacaaaagaattagaatacttcccagaaaccgataaggtatgggttgagattggagaaacggaaggaacattcattgtggatagtgtggaattactccttatggaggaataa

SEQ ID NO: 274 - DNA, 2920 bp, Bacillus thuringiensis
  source 1..2920: mol_type = genomic DNA
atcgatgaaaatatctctgctttttctttctttatttggtatatgctttacttgtaatcgaaaataaagcactaataagagtatttataggtgtttgaagtcatttcagttcatttttaaaggaggtttaaaagtgttagaaagttattaaggaataatacttacagtaaatcctacctatattttacaattaattatgatatttatgcataaattaaaaatgctttatttgacattacagctaagtataattttttatgaataaaattttatttgaaaattaaataatattatatgtgagggattaatatgaaactaaagaatccagataagcatcaaagcttgtctagcaatgcgaaagtagataaaatcgctacggattcactaaaaaatgaaacagatatagaattgaaaaatattaatcatgaggatttcctaagaatgtctgagcatgagagtattgatccgtttgttagtgcatcaacaattcaaacgggtattggaattgctggtaagattcttggtactctaggtgttccttttgctggacaaatagctagcctctatagttttatcttaggcgagctttggcctaaagggaaaagtcaatgggaaatctttatggaacatgtagaagagcttattgaccaaaaaatatcaacttacgcaagaaacatagcacttgcagatttaaaaggcttaggagatgctttggctgtctaccatgaatcgcttgaaagttggattaaaaatcgcaacaacgcaagggctacaagtgttgtcaagagccaatatattgctttagaactattgtttgttcaaaagctgccttcttttgcagtatcaggtgaggaagtaccattattgccaatatatgcacaagctgcaaatttacacttattattactaagagatgcttctgtttttggaaaagagtggggattatctaattcgcaaatttctacattttataatcgtcaagtcgaaagaacgagtgactattccgaccattgtgtgaaatggtatagtacaggtctaaataacttgagaggtacaaatgccgaaagctgggtccgttataatcaatttcgtaaagatatgacattaatggtactagatttaatcgcattattcccaagctatgatacacttgtatatccaattaaaaccacttctcaacttacaagagaagtatatacagacgcaattgggacagtacatccaaatgcaagttttgcaagtacgacctggtataataataatgcaccttcgttctctgccatagagtctgctgttgttcgaaacccgcatctactcgattttttagaacaagttacaatttacagcttattaagtaggtggagtaacactcagtatatgaatatgtggggaggacatagactggaattccgaacaataggtggagtgttaaatacctcaacacaagggtctactaatacttctattaatcctgtaacattaccgttcacgtctcgagacgtctataggactgaatcattggcagggctgaatctatttttaactcaacctgttaatggagtacctagggttgattttcattggaaattcgccacacttccgattgcatctgataatttttattatctagggtatgctggagttggtacgcaattacaagattcagaaaatgaattaccacctgaaacaacaggacagccaaattatgaatcatatagtcatagattatcccatataggactcatttcagcatcccacgtgaaagcattggtatattcttggacacatcgtagtgcagatcgtacaaatacaattgagccaaatagcattacacaaataccattagtaaaagcgttcaatctgtcttcaggtgccgctgtagtgagaggaccaggatttacaggtggggatatccttcgaagaacgaatactggtacatttggggatatacgagtaaatattaatccaccatttgcacaaagatatcgcgtgaggattcgctatgcttctactacagatttacaattccatacgtcaattaacggtaaagctattaatcaaggtaatttttcagcaactatgaatagaggagaggacttagactataaaacctttagaactgtaggctttaccactccatttagcttttcagatgtacaaagtacattcacaataggtgcttggaacttctcttcaggtaacgaagtttatatagatcgaattgaatttgttccggtagaagtaacatatgaggcagaatatgattttgaaaaagcgcaagagaaggttactgcactgtttacatctacgaatccaagaggattaaaaacagatgtaaaggattatcatattgaccaggtatcaaatttagtagagtctctatcagatgaattctatcttgatgaaaagagagaattattcgagatagttaaatacgcgaagcaaatccatattgagcgtaacatgtagaattaaaatctacctaaatccagaaaaataaaagggttaaatatacaattcttgtaccaatattttgagtgattagatgtaggatgaaatttaattgtatgctatttaacagtagagatattaaaaattaatttatctatacattaatagtatagacatacaaacataagagagcattgtcttttcgtaggctacaatgctctctatttactatttatttttcttttgtatcttcaaattgacgttgttctaagcgttctattgcagctcgtcgtttagtatcatcaatgtttgtataaagagatgttgtttccatagaattatgtcccatttgatttgctaataatactaaatctttattttcattatagtgattagtagcataagtatgacgtaatttatgagggcttttcttttcatcaaaagcccttgtgtatttctctgtaagctt

SEQ ID NO: 275 - DNA, 4623 bp, Bacillus thuringiensis
  source 1..4623: mol_type = genomic DNA
tcaatttaaatatttcattttgaatataataaaactaaataatatgaagtttagaatattaatgttatgagctgctatcaaaaggaaagctgctatcaaaaggaaagcaataatgaagaataaataatagcttatatttttaggaaggccaaaagataagctattaaaacatactgaattcattctaaatataggtaatatatttatatttaataaaattcgttgcattttgtgaatattttcataagctgaaccatatgatttaaactggggccaagataaatggcccaaagttataaaggcatatgtgctaaagtccaaaaaacgggaggtaaatcatcaaaaaaatcgtactatacaattttcttaggtaatgctgtgttaaaactaatcagtggagaaaagttaaataggttgtaatgtaagcacaacgtaaaaggaggagttatattgaattcaaataggaaaaatgagaatgaaattataaatgctttatcgattccagctgtatcgaatcattccgcacaaatggatctatcaccagatgctcgcattgaggatagcttgtgtgtagccgaggggaacaatattgatccatttgttagcgcatcaacagtccaaacaggtattagtatagctggtagaatattaggcgtattaggggtgccgtttgccggacaactagctagtttttatagttttcttgttggggaattatggcctagcggcagagatccatgggaaatttttatggaacatgtcgaacaaattgtaagacaacaacaaataacggacagtgttagggataccgctattgctcgtttagaaggtctaggaagagggtatagatcttaccagcaggctcttgaaacttggttagataaccgaaatgatgcaagatcaagaagcattattcgtgagagatatattgctttagaacttgacattactactgctataccgcttttcagcatacgaaacgaagaggttccattattaatggtatatgctcaagctgcaaatttacacctattattattgagagacgcatccctttttggtagtgaatgggggatgtcatctgccgatgttaaccaatattaccaagaacaaatcagatatacagaggaatattctaaccattgcgtacaatggtataatacagggctaaatagattaagagggacaactgccgaaacttgggtacggtataatcaattccgtagagacctaacattaggtgtattagatttagtggcactattcccaagctatgacactcggacttatcccattccaactaccgcccaacttacaagagaagtgtatacagatccaaacggtgttgtagcaggacccaataatagttggtttagaaatggagcttcgttttccgctatagaaaacgcaattattcgacaacctcacctatatgattttctaacgaaccttacaatttacacgagaagaagtcaagtaggcactacaattatgaatttgtgggcagggcatagaatcacgtttaatagaatacaaggtggttctactagtgaaatggtgtatggggctattactaacccagttagtgttagtgacataccatttgtcaatcgggatgtttaccgaactgtatcattagctggtgggcttggctctctgagtggaatacgttatggtttaactagagttgattttgatatgatatttcgtaaccatcctgatatagtaactggattattttatcatccgggacacgcgggcattgcaacccaagtaaaagattcagacacagaattaccacctgaaacgacagaacagccaaattatagagcatttagtcatctactaagtcatatttcaatgggtccaacgactcaagacgtacctccagtatattcttggacacaccagagtgcagatcgtacgaatacaatcaattcggataggataacacaaataccattggtaaaggcgcataccctccaatcgggtaccactgtagtaaaagggccagggtttacaggaggggatatcctccgtcgaacaagtggaggaccatttgcttttagtaatgttaatctagattttaacttgtcacaaaggtatcgtgctagaattcgttatgcctctactactaacctaagaatttacgtaacggttgcaggtgaacgaatttttgctggtcaatttgacaaaacgatggatgctggtgccccattaacattccaatcttttagttacgcaactattaatacagcttttacattcccagaaagatcgagcagcttgactataggtgccgatacgtttagttcaggtaatgaagtttatgtagatagatttgaattaatccaagttactgcaaccttcgaggcagaatctgatttagaaagagcgcggaaggcggtgaatgccttgtttacttctacaaatccaagaggattaaaaacagatgtaacagattatcatatcgaccaagtatccaatctagtagagtgtttatcagatgaattctgcttggataaaaagagagaattactcgaagaagttaaatatgcaaagcgacttagtgatgagcggaatttactccaagatccgacttttacatccattagtggccaaacagaccgtggatggataggaagcactggtattagcattcaaggaggcgatgacatattcaaagaaaattatgtgagactaccaggtaccgttgacgagtgctatccaacgtatttgtatcaaaaaatagatgagtcacaattaaaatcttatactcgctatcaattaagaggctatatcgaagatagtcaagatttagagatttatttgattcgttacaatgcgaaacatgaaacattaagtgtgccaggtactgagtccccatggccatcttcaggagtatatccaagtggaaggtgcggagaaccgaatcgatgtgcaccacgaatcgaatggaatcccgatctagactgttcttgcagatatggagagaaatgcgttcatcattcccatcatttctccttggatattgatgttggatgtacagatttgaatgaggatctaggcgtatgggtgatatttaagattaagacacaagatggccatgcgaaactaggaaatctagaattcatcgaagagaaaccattattaggaaaagcgctgtcccgtgtgaagagagccgagaaaaaatggagagacaaatatgaaaaactacagttggagacaaaacgagtatatacagaggcaaaagaatctgtggatgctttatttgtagactctcaatatgataaattgcaagctaatacgaacatcgggataatccatggggcagataaacaggttcatcgaatccgagaaccgtatctttcagaattacctgtcattccgagtatcaatgcggccatttttgaagaattagagggccatattttcaaagcgtattctctatatgatgcaagaaatgtcataaaaaatggcgatttcaataatggtttatcgtgttggaacgtaaaagggcatgtagatgtacaacagaaccatcatcgttcggtccttgttctctcagaatgggaagcagaagtgtcacaaaaggtacgcgtatgtccagatcgaggctatatccttcgtgtcacagcgtataaagagggatatggagagggatgcgtaacgattcatgaattcgaagataatacggatgtactgaagtttagaaactttgtagaagaggaagtatatccaaacaacacggtaacgtgtaatgattatactacgaatcaaagtgcagaaggatctacggatgcatgtaattcctataatcgtggatatgaggatggatatgagaatagatatgaacccaatccttcagcaccagttaattacacaccgacgtacgaagaaggaatgtatacagatacacagggatataatcattgtgtatctgatcgaggatataggaatcatacaccattaccagctggttatgtaacactagaattagagtatttcccagaaacagagcaagtatggatagaaattggagaaacggaaggaacatttatcgtaggtagcgtggaattactccttatggaggaataggatacgttttaaagtgaaacgtatgcaaataaagaatgatcgctggcctatattgacagataaataaggaaattaatatatgaacaaaaacggacatcactcttaagggtatgatgtccgttttttatatgatttggtttaaagattgatatgtaaatatatttttttacgaaggctttacataaaaaagaatctttatagcaaaatttaaaattaaatcttacatatagctggattgaaaataaagcaaacttattaattgaattatataaaaagattaaatgctattcaagatcttaacattttgttaaatctacttcattaacgttacttaaatgtattttataataatatttagtaacttgtattggtattttaaattttttgattattaaaagacgttaaatataaaaacagaaagaaggaatgaatttggataataactccttattgaaaagtatgcattgagattataaaaactaaaatcgtggtattttttataataacaaccatgttttttttcat

SEQ ID NO: 276 - DNA, 1902 bp, Bacillus thuringiensis
  source 1..1902: mol_type = genomic DNA
atgaatagtgtattgaatagcggaagaactaccattcgtgatgcgtataatgtagtggctcatgatccatttagttttcaacacaaatcattagataccatacaaaacgaatggacggagtggaaaaaaaataatcatagtttatatgtagatcctattgttggaactgtggctagttttctgttaaagaaagtggggagtcttattggaaaaaggatactaagtgagttacggaatttaatatttcctagtggcagtacaaatctaatgcaagatattttaagagagacagaaaaattcctgaatcaaagacttaatacagacactcttgcccgtgtaaatgcggaattgacagggatgcaagcaagtgtagaagagtttaatcgacaagtagataattttttgaaccctaaccgaaacgctgttcctttatcaataacttcttcagttaatacaatgcagcaattatttctaaatagattaccccagttccagatgcaaggataccaactgttattattacctttatttgcacaggcagccaatttacatctttcttttattagagatgttattcttaatgcagatgaatggggaatttcagcagcaacattacgtacgtatcgagattacctgaaaaattatacaagagattactctaactattgtataaatacgtatcaaagtgcgtttagaggcttaaacactcgtttacacgatatgctagaatttagaacatatatgtttttgaatgtatttgaatatgtatctatctggtcgttgtttaaatatcaaagtcttctagtatcttccagttcgaatttatattcaagtggtagtggaccacagcagacccaatcatttacttcacaagactggccatttttatactctcttttccaagttaattcaaattatgtgttaaatggttttagtggtgctaggctttctaataccttccctaatatagttggtttacctggttctactacaactcacgcattgcttgctgcaagggtcaattacagtggaggaatttcgtctggtgatataggtgcatcgccgtttaatcaaaattttacttgtagcacatttctctcccctttgttaacgccatttgttaggagttggctagattcaggttcagatcgggagggtgttgccaccgttacaaattggcaaacagaatcctttgagacaactttagggttaaggagtggtgcttttacagctcgcggtaattcaaactatttcccagattattttattcgtaatatttctggagttcctttagttgttagaaatgaagatttaagaagaccgttgcactataatgaaataagaaatatagcaagtccttcaggaacacctggtggagcacgagcttatatggtatctgtgcataacagaaaaaataatatctatgccgttcatgaaaatggttctatgattcatttagcgccaaatgactatacaggatttactatttcgccaatacatgcaactcaagtgaataatcaaacacgaacatttatttctgaaaaatttggaaatcaaggtgattccttaagggttgaacaaagcaacacgacagctcgttatacgcttagagggaatggaaatagttacaatctttatttaagagtatcttccataggaaattccactattcgagttactataaacggtagagtttatactgctttaaatgttaatactactacaaataacgatggagttaatgataatggagctcgtttttcagatattaatatcggtaatgtagtagcaagtagtaatactgatgtaccattagatgtaaatataacattaaactccggcactcaatttgatcttatgaatattatgcttgtgccaactaatatttcaccactttattaa

SEQ ID NO: 277 - DNA, 1952 bp, Bacillus thuringiensis
  source 1..1952: mol_type = genomic DNA
tccatggatgaatccgaacaatcgaagtgaacatgatacaataaaaactactgaaaataatgaggtgccaactaaccatgttcaatatcctttagcggaaactccaaatccaacactagaagatttaaattataaagagtttttaagaatgactgcagataataatacggaagcactagatagctctacaacaaaagatgtcattcaaaaaggcatttccgtagtaggtgatctcctaggcgtagtaggtttcccgtttggtggagcgcttgtttcgttttatacaaactttttaaatactatttggccaagtgaagacccgtggaaggcttttatggaacaagtagaagcattgatggatcagaaaatagctgattatgcaaaaaataaagctcttgcagagttacagggccttcaaaataatgtcgaagattatgtgagtgcattgagttcatggcaaaaaaatcctgtgagttcacgaaatccacatagccaggggcggataagagagctgttttctcaagcagaaagtcattttcgtaattcaatgccttcgtttgcaatttctggatacgaggttctatttctaacaacatatgcacaagctgccaacacacatttatttttactaaaagacgctcaaatttatggagaagaatggggatacgaaaaagaagatattgctgaattttataaaagacaactaaaacttacgcaagaatatactgaccattgtgtcaaatggtataatgttggattagataaattaagaggttcatcttatgaatcttgggtaaactttaaccgttatcgcagagagatgacattaacagtattagatttaattgcactatttccattgtatgatgttcggctatacccaaaagaagttaaaaccgaattaacaagagacgttttaacagatccaattgtcggagtcaacaaccttaggggctatggaacaaccttctctaatatagaaaattatattcgaaaaccacatctatttgactatctgcatagaattcaatttcacacgcggttccaaccaggatattatggaaatgactctttcaattattggtccggtaattatgtttcaactagaccaagcataggatcaaatgatataatcacatctccattctatggaaataaatccagtgaacctgtacaaaatttagaatttaatggagaaaaagtctatagagccgtagcaaatacaaatcttgcggtctggccgtccgctgtatattcaggtgttacaaaagtggaatttagccaatataatgatcaaacagatgaagcaagtacacaaacgtacgactcaaaaagaaatgttggcgcggtcagctgggattctatcgatcaattgcctccagaaacaacagatgaacctctagaaaagggatatagccatcaactcaattatgtaatgtgctttttaatgcagggtagtagaggaacaatcccagtgttaacttggacacataaaagtgtagacttttttaacatgattgattcgaaaaaaattacacaacttccgttagtaaaggcatataagttacaatctggtgcttccgttgtcgcaggtcctaggtttacaggaggagatatcattcaatgcacagaaaatggaagtgcggcaactatttacgttacaccggatgtgtcgtactctcaaaaatatcgagctagaattcattatgcttctacatctcagataacatttacactcagtttagacggggcaccatttaatcaatactatttcgataaaacgataaataaaggagacacattaacgtataattcatttaatttagcaagtttcagcacaccattcgaattatcagggaataacttacaaataggcgtcacaggattaagtgctggagataaagtttatatagacaaaattgaatttattccagtgaattaatgaggatcca

SEQ ID NO: 278 - DNA, 3543 bp, Bacillus thuringiensis
  source 1..3543: mol_type = genomic DNA
atgaatccttatcaaaataaaaatgaatatgaaacattaaatgcttcacaaaaaaaattaaatatatctaataattatacaagatatccaatagaaaatagtccaaaacaattattacaaagtacaaattataaagattggctcaatatgtgtcaacagaatcagcagtatggtggagattttgaaacttttattgatagtggtgaactcagtgcctatactattgtagttgggaccgtactgactggtttcgggttcacaacacccttaggacttgctttaataggttttggtacattaataccagttctttttccagcccaagaccaatctaacacatggagtgactttataacacaaactaaaaatattataaaaaaagaaatagcatcaacgtatataagtaatgctaataaaattttaaacaggtcgtttaatgttatcagcacttatcataatcaccttaaaacatgggagaataatccaaacccacaaaatactcaggatgtaaggacacaaatccagctagttcattaccattttcaaaatgtcattccagagcttgtaaactcttgtcctcctaatcctagtgattgcgattactataacatactagtattatctagttatgcacacgcagcaaacttacatctgactgtattaaatcaagccgtcaaatttgaagcgtatttaaaaaacaatcgacaattcgattatttagagcctttgccaacagcaattgattattatccagtattgactaaagctatagaagattacactaattattgtgtaacaacttataaaaaaggattaaatttaattaaaacgacgcctgatagtaatcttgatggaaatataaactggaacacatacaatacgtatcgaacaaaaatgactactgctgtattagatgttgttgcactctttcctatttatgatgtaggtaaatatccaataggtgtccaatctgaacttactcgagaaatttatcaggtacttaacttcgaagaaagcccctataaatattatgactttcaatatcaagaggattcacttacacgtagaccgcatttatttacttggcttgattctttgaatttttatgaaaaagcgcaaactactcctaataattttttcaccagccattataatatgtttcattacacacttgataatatatcccaaaaatctagtgtttttggaaatcacaatgtaactgataaattaaaagctcttggtttggcaacaaatatttatatttttttattaaatgtcataagcttagataataaatatctaaatgattataataatattagtaaaatggatttttttataactaatggtactagacttttggagaaagaacttacagcaggatctgggcaaataacttatgatgtaaataaaaatattttcgggttaccaattcttaaacgaagagagaatcaaggaaaccctaccctttttccaacatatgataactatagtcatattttatcatttattaaaagtcttagtatccctgcaacatataaaactcaagtgtatacgtttgcttggacacactctagtgttgatcctaaaaatacaatttatacacatttaactacccaaattccagctgtaaaagcgaattcacttgggactgcttctaaggttgttcaaggacctggtcatacaggaggggatttaattgatttcaaagatcatttcaaaattacatgtcaacactcaaattttcaacaatcgtattttataagaattcgttttgcttcaaatggaagcgcaaatactcgagctgttataaatcttagtatcccaggggtagcagaactgggtatggcactcaaccccactttttctggtacagattatacgaatttaaaatataaagattttcagtacttagaattttctaacgaggtgaaatttgctccaaatcaaaacatatctcttgtgtttaatcgttcggatgtatatacaaacacaacagtacttattgataaaattgaatttctgccaattactcgttctataagagaggatagagagaaacaaaaattagaaacagtacaacaaataattaatacattttatgcaaatcctataaaaaacactttacaatcagaacttacagattatgacatagatcaagccgcaaatcttgtggaatgtatttctgaagaattatatccaaaagaaaaaatgctgttattagatgaagttaaaaatgcgaaacaacttagtaaatctcgaaatgtacttcaaaacggggattttgaatcggctacgcttggttggacaacaagtgataatatcacaattcaagaagatgatcctatttttaaagggcattaccttcatatgtctggggcgagagacattgatggtacgatatttccgacctatatattccaaaaaattgatgaatcaaaattaaaaccgtatacacgttacctagtaaggggatttgtaggaagtagtaaagatgtagaactagtggtttcacgctatggggaagaaattgatgccatcatgcatgttccagctgatttaaactatctgtatccttctacctgtgattgtgaagcgtctaatcgttgtgagacgtccgctgtgccggctaacattgggaacacttctgatatgttgtattcatgccaatatgatacagggaaaaagcatgtcgtatgtcaggattcccatcaatttagtttcactattgatacaggggcattagatacaaatgaaaatataggggtttgggtcatgtttaaaatatcttctccagatggatacgcatcattagataatttagaagtaattgaagaagggccaatagatggggaagcactgtcacgcgtgaaacacatggagaagaaatggaacgatcaaatggaagcaaaacgttcggaaacacaacaagcatatgatgtagcgaaacaagccattgatgctttattcacaaatgtacaagatgaggctttacagtttgatacgacactcgctcaaattcagtacgctgagtatttggtacaatcgattccatatgtgtacaatgattggttgtcagatgttccaggtatgaattatgatatctatgtagagttggatgcacgagtggcacaagcgcgttatttgtatgatataagaaatattattaaaaatggtgattttacacaaggggtaatggggtggcatgtaactggaaatgcagacgtacaacaaatagatggtgtttctgtattggttctatttaattggagtgctggcgtatctcaaaatgtccatctccaccataatcatgggtatgtcttaggtgttattgccaaaaaagaaggacctggaaatgggtatgtcacgcttatggattgggaggagaatcaagaaaaattgacgtttacgtcttgtgaagaaggatatattacgaagacagtagatgtattcccagatacagatcgtgtacgaattgagataggcgagaccgaaggttcgttttatatcgaaagcattgatttaatttgcatgaacgagtga

SEQ ID NO: 279 - DNA, 1470 bp, Bacillus thuringiensis
  source 1..1470: mol_type = genomic DNA
atgtttacaagtggtgcgaaaaataggttaaagctagaaacgacagattatgaaatagatcaagtggctaatgctatagaatgtatgtcagatgaacaatattcaaaagaaaaactgatgttatgggatcaagtaaaacatgcaaaataccttagtcagtctcgaaatttgcttcaaaatggtgattttgaagatgtatttcatggatggactacaagtgatcatatgtacattcagtcggataattctacttttaaaggaaattatctgaatatatctggggcgcgagacatatacttaacgatatttccaacatacatttaccaaaaaattgatgaatcaaaattaaaaccgtatacacgttacctagtaaggggatttgtaggaagtagtaaagatgtagaactagtggtttcacgctatggaaaagaaatagatacagtcatgaatgtaccatttgatatcccgtatgtatcttctaggcctgtttgtaatgaattatatgatggtgaacaacaaccgtatccaaatgggaatgtaggatattataatccaatgtcagcttttacgccttcttacacatctgatgctcgtcagtgtatgccagggaaaaaacagatagtctgtcaagattctcatcagtttaagttccatattgatacaggtgaagtagattataatacaaatatagggatttgggtcatgtttaaaatatcttccccagatggatacgcattattagataatttagaagtaattgaagaagggccaatagatggggaagcactgtcacgcgtgaaacacatggagaagaaatggaacgatcaaatggaagcaaaacgttcggaaacacaacaagcatatgatgtagcgaaacaagccattgatgctttattcacaaatgtacaagatgaggctttacagtttgatacgacactcgctcaaattcagtacgctgagtatttggtacaatcgattccatatgtgtacaatgattggttgtcagatgttccaggtatgaattatgacatctatgtagagttggatgcacgagtggcacaagcgcgttatttgtatgatacaagaaatattattaaaaatggtgattttacacaaggggtaatggggtggcatgtaactggaaatgcagacgtacaacaaatagatggtgtttctgtattggttctatctaattggagtgctggcgtatctcaaaatgtccatctccaacataatcatgggtatgtcttacgtgttattgccaaaaaagaagggcctggaaatgggtatgtcacgcttatggattgtgaggagaatcaagaaaaattgacgtttacgtcttgtgaagaaggatatattacgaaaacagtagatgtattcccagatacagattgtgtacgaattgagataggcgaaaccgaaggttcgttttatatcgaaagcattgaattaatttgcatgaacgagtaa

SEQ ID NO: 280 - DNA, 4377 bp, Bacillus thuringiensis
  source 1..4377: mol_type = genomic DNA
atggcaattttaaatgaattatatccatctgtaccttataatgtattggcgtatacgccaccctcttttttacctgatgcgggtacacaagctacacctgctgacttaacagcttatgaacaattgttgaaaaatttagaaaaagggataaatgctggaacttattcgaaagcaatagctgatgtacttaaaggtatttttatagatgatacaataaattatcaaacatatgtaaatattggtttaagtttaattacattagctgtaccggaaattggtatttttacacctttcatcggtttgttttttgctgcattgaataaacatgatgctccacctcctcctaatgcaaaagatatatttgaggctatgaaaccagcgattcaagagatgattgatagaactttaactgcggatgagcaaacatttttaaatggggaaataagtggtttacaaaatttagcagcaagataccagtctacaatggatgatattcaaagccatggaggatttaataaggtagattctggattaattaaaaagtttacagatgaggtactatctttaaatagtttttatacagatcgtttacctgtatttattacagataatacagcggatcgaactttgttaggtcttccttattatgctatacttgcgagcatgcatcttatgttattaagagatataattactaagggtccgacatgggattctaaaattaatttcacaccagatgcaattgattcctttaaaaccgatattaaaaataatataaagctttactctaaaactatttatgacgtatttcagaagggacttgcttcatacggaacgccttctgatttagagtcctttgcaaaaaaacaaaaatatattgaaattatgacaacacattgtttagattttgcaagattgtttcctacttttgatccagatctttatccaacaggatcaggtgatataagtttacaaaaaacacgtagaattctttctccttttatccctatacgtactgcagatgggttaacattaaataatacttcaattgatacttcaaattggcctaattatgaaaatgggaatggcgcgtttccaaacccaaaagaaagaatatcaaaacaattcaaactgtatcctagttggagagcgggacagtacggtgggcttttacaaccttatttatgggcaatagaagtccaagattctgtagagactcgtttgtatgggcagcttccagctgtagatccacaggcagggcctaattatgtttccatagattcttctaatccaatcatacaaataaatatggatacttggaaaacaccaccacaaggtgcgagtgggtggaatacaaatttaatgagaggaagtgtaagcgggttaagttttttacaacgagatggtacgagacttagtgctggtatgggtggtggttttgctgatacaatatatagtctccctgcaactcattatctttcttatctctatggaactccttatcaaacttctgataactattctggtcacgttggtgcattggtaggtgtgagtacgcctcaagaggctactcttcctaatattataggtcaaccagatgaacagggaaatgtatctacaatgggatttccatttgaaaaagcttcttatggaggtacagttgttaaagaatggttaaatggtgcgaatgcgatgaagctttctcctggacaatcgataggtattcctattacaaatgtaacaaaacaaaactatcaagtgcgttgtcgttatgcaagtaatagtgataatcctgttttctttaatgtagatactggtggagcgaatccaattttccaacagataaactttgaatctactgtagatagtaatatgggagtaaaaggagaaaatggcgtctatgtagtcaaatctattgctacaactgataattcttttacagtaaaaattcctgcgaagacgattaatgttcatttaaccaaccaaggttcttctgatatctttttagatcgtattgagtttattccttttaaactaacattatctcctactccaattactttagatccgatgaagaccattacagcttctgtcttaagtgcaactagggcctctgatggcataacaaccatcaatgatccagtagatggaactctactttctttacctatgggtacttccatcgattttagtattcttaatcctactcaaactggaacatatcaagtcagtattctctacaaatcttcatccggcggttttactattactaaagtaacaaatgatcaaaacggacagatggtagattatgcttcaacctcagaactacaatatagcaaccctatttacgtcttgtctagcaatacaggaaacactgtattgaccattggacctgggggatattccggcccagatttactcataaaagaaattagattcaccccagcaactccaaattcatcaaataaaattgatacagattttcagttagttgatgggcaaggcacagtaactatttggaaaagtgataaaattgcatatacactagcagatatagatatacagatttcctttaatcaaaccgcttggcaaagtcctaatattacaccttatttaaatgatgatccagtaggtggaatagcaactttttataatactactggtgaatcccaacattttactaaagatagtctactcttccaaagaggttttaacaatattcgggttaacaatggatttggtggtgccactatttctggtcatatgaaagcaaatgtaattgataatccttcttaaaaattaaggttcattttaaaaacttcaggttacaacgtttactattttaaatttacaaactaagggggccgcgtaatggtactatcacgtatagtcaatcccattttcaccgagcaagaagatttaaataatattataacgcaaatcaatgctctattcgtttctagtacacaagataaattaaaaccaggtgtgagtgattattggatcgaggaaattgtactgaaagtggatgccttatcagatgaggtatttggaacagaaaagaaggctttacgtaaattggtgaatcaggcaaaacgtttaagtaaagcaagaaatcttctgataggcggtagttttgaaaattgggatgcatggtataaagggcaaaaagtagtaagattatcggatcacgaactgttgaagagtgatcatgtattattaccaccaccaggattgtctccatcttatattttccaaaaagtggaggaatctaaattaaaagcaaatacacgttatacggtttctggatttattgcgcatgcaacagatttagaaattgtggtttctcgttatgggcaagaaataaagaaagtggtgcaagttccttatggagaagcattcccattaacatcaagtggaccagtttgttgtatcccacattctacaagtaatggaactttaggcaatccacatttctttagttacagtattgatgtaggtgcattagatgtagacacaaaccctggtattgaattcggtcttcgtattgtaaatccaactggaatggcacgcgtaagcaatttggaaattcgtgaagatcgtccattagcagcaaatgaaatacgacaagtacaacgtgtcgcaagaaattggagaaccgagtatgagaaagaacgtgcggaagtaacaagtttaattcaacctgttatcaatcgaatcaatggattgtatgacaatggaaattggaacggttctattcgttcagatatttcgtatcataatatagacgcgattgtattaccaacgttaccaaagttacgccattggtttatgtcagatagatttagtgaacaaggagatatcatggctaaattccaaggagcattaaatcgtgcgtatgcacaactggaacaaaatacgcttctgcataatggtcattttacaaaagatgcagccaattggacggtagaaggcgatgcacatcaggtagtattagaagatggtagacgtgtattacgattgccagattggtcttcgagtgtgtctcaaacgattgaaatcgagaattttgatccagataaagaatatcaattagtatttcatgggcaaggagaaggaacggttacgttggagcatggagaagaaacaaaatatatagaaacgcatacacatcattttgcgaattttacaacttctcaacgtcaaggactcacgtttgaatcaaataaagtgacagtgaccatttcttcagaagatggagaattcttagtggataatattgcgcttgtagaagtccctatgtttaacaagaatcaaatggtcaatgaaaataaaggtgtaaatataaatagcgatacaagtatgaacaacaatcaa

SEQ ID NO: 281 - DNA, 2097 bp, synthetic construct
  source 1..2097: mol_type = other DNA
atggcaaccatcaacgagctgtacccagtgccctacaatgtactcgctcacccaatcaaggaagtagacgatccttatagttggtctaacttgctgaagggaatccaagagggctgggaggaatggggaaagacgggccagaagaagctctttgaggaccatttgacaattgcgtggaacctgtacaagaccggaaagttagattacttcgcactcactaaggcttcaatcagtctgattggcttcatcccaggagccgaggctgcagtccccttcatcaatatgtttgttgacttcgtttggccaaagttgttcggcgccaacacagaaggaaaggatcaacagctcttcaacgcaatcatggacgctgtgaataagatggtcgataacaagtttctgtcctacaacttgtccacgctcaacaaaaccatagagggcctccaaggaaacttgggcttattccagaatgccatccaggttgctatctgtcaaggatctactcccgagcgcgtcaatttcgaccagaactgcacaccatgcaatcctaaccagccatgcaaggatgacctcgatagagtggccagtcgattcgacaccgctaactcacagtttacccagcatcttcctgaattcaagaatccatggagcgatgagaactccacgcaagaattcaagagaactagcgtcgaactcacacttcctatgtacaccactgtggccacactccaccttctcttgtacgaggggtacatagagttcatgaccaaatggaacttccacaacgaacagtacctcaacaaccttaaggttgagttgcagcaactcatccactcatacagcgagactgtgaggacatcttttcttcagttcttgccaaccctcaataaccggtcaaaatctagcgtcaacgcctacaatcgttacgtgaggaacatgactgttaactgtcttgacatcgctgcaacatggccgaccttcgatactcacaattaccaccaaggtgggaagttggacctcacacggatcatcctttcagataccgccggtccaatcgaggagtacactactggagacaagacctctggtcccgagcactccaacatcactcctaacaatatcttggatacaccgtcccccacctatcagcattctttcgtcagcgtggactccattgtctattctaggaaggagctccagcaacttgatatcgctacttacagcacaaacaactccaataactgccatccttacgggttgagactctcttacaccgacggtagcagatacgattacggagacaaccagcctgatttcactacatccaataacaactattgtcacaattcttacaccgcaccgattactcttgttaacgccagacacttgtacaacgctaaaggaagcctacagaatgtggaatccctcgtggtctctacagttaacgggggtagcgggtcctgcatttgcgacgcatggattaactatttgcgtcccccacaaacctctaagaacgagtccaggcctgaccagaaaatcaacgtgctatacccaattactgagacagtgaacaagggtaccgggggcaatctgggagtaatctcggcttacgttcctatggagttggtgccagagaacgtcattggtgacgtgaacgcagacaccaagttgcctctgacacaattgaaggggttcccattcgagaagtatggtagtgaatacaataaccgtggaatctcgctcgttagagaatggatcaatggaaacaacgcagtcaagctgtccaattcgcagtccgtcgggatacagattaccaatcagactaaacagaagtacgagatccgttgccgatatgcttcaaagggggataacaatgtttacttcaacgtggacttgtctgagaacccctttcgcaatagtatttcattcgggtccacagaatcatctgtggttggcgtccaaggggagaacggcaagtacatcctcaagagtattaccactgtggagatcccagccggatcattctatgtccacattacaaaccagggctcctcagacctgttcttggataggatcgaattcgttcctaagattcagtaa

SEQ ID NO: 282 - DNA, 3393 bp, Bacillus thuringiensis
  source 1..3393: mol_type = genomic DNA
atgattcaaaaaaactatgaaattataggtgcttcaacaaacggcataaccgaattacctgaagattacaacactatagtcagcccctatgatgctccagcatccgttactacaactattgaaattactggaaccatactaagcgatttaggtgtttcaggggcatcatcagttagtttacttttgaataaacttttaaatatattatggccaaataatgccaatactgtgtgggggacattcgcaaaagagaccgctgatcttctaaatgaagtgttatctgtggatgatccagtagtaatagaagcaaatattaatttagaagggctaaaaagcacccttgatttatatttagaggcacttaaagaatggaaaaatgatccccaaaatccagcatcccaagagcgtgtcagaactagatttcgtaatgtggatgatgattttacacatgatatgccttcctttgctagagctggatatgaaacgaagctattaacagtttatgcacaagctgcaaatcttcatttacttttattaagagatgcttctatgtttggagaaggttggggaatgtctcaagtaaacataaatgataactataatcgccaattacgattgacggctcaatatacggatcatagtgtaaagtggtataacgcaggactagaaaaattaaaagggaattcaactagggaaaattggtatacttgtaatagatttcagagagaaatgacgttaatggtgttagacgtagttgcattatttccaaactacgatacacgaatgtacccgatcgcaacgtcatcagaacttacaagaatgatttatacagatccaattgcttatacacaaagcgatccatggtacaagataacatctctttctttttcaaatattgaaaacagtgcgattccaagtccatctttcttcaggtggctaaaatccatttcaattaatagccagtggtggggcagtggtcctagtcaaacctactattgggttggacatgaattggtatattctaattcaaattataatcaagcacttaaggttaaatatggagaccccaattcttatattgagccccctgattctttcagcttttcttctaaggatgtttacagaaccatctctgtcgttagaaattcaataagtaattatatagtaagtgaagttcaattcaattagtaatacacataaaattagtgagaaatttataaacatcaatcaaattgggatagaagagaaacaaaagattcaattactgaactatccttagctgctaatcccccaacaacatttggaaatgtagcagaatacagtcatagattagcatatatttcagaggcataccaaagtcacaacccatcaaaatacccaacctacatacctgtattcggttggacgcacacaagcgtacgttacgataataaaatttttccggaaaaaatcactcaaattccagctgttaaaagcccttcagctgaaggttgatcatggcaaaatatagtaaaaggtcccgggtttactgaaggagatgtgacaactgctgtttcgccagcaactgtaaccgacataataaaaatacacgttactctagatccaaattcactttcacaaaaatatcgtgcatgacttcgctatgcttccaatgcatttgtagcagctacattgtatacaaatacaagtagtaattataattttgaacttacagaaagtacaactgaacagtttacaacatataattcatacaagtatgtagatattccaggttcaatacaatttaataatacttctgatacagtgtctgtttatttgcatatggattcaacaactaatgcaaccgttcatgtagatagaattgaattcattccagtagatgaaaattacgataacagagtaagactagaaaaagcacagaaatctgtgactgccttgtttacagcgggaagaaatgcactccaaacggatgtgacagattttaatgtagatcaggtttcaattttagttgattgtataccacgggcattatatcctaatgagaaacgcgaactactaagtttagtcaaatatgcaaaacgtttgagctattcccgtaatttcctcctagatccaacattcaattctatcaattcatcagatgagaatggctggtacggaagtaatggtattgcaattggcagtgggaatattttattcaaagggaactatttaattttctcaggtgccaatgatgaacagtatccaacctatctctatcaaaaaatagacgaatctaagttaaaagaatatacacattataaactgacaggttttatcgagagtagtcaggatttagaagcatacgtgattcgttatgatgcaaaacatcaaacaatggatgtatccaataatctattctcagatattactcctgtaaatgcatgcggagaaccaaatcgttgtgcggcactaccatacctggatgaaaatccaagattagaatgtagttcgatacaagatggtattttatctgattcgcattcgttttctctccatatagatacaggttcaattgatttcaatgagaacgtaggaatttgggtgttgtttaaaatttctacacctgaaggatatgcgagatttggaaacctagaagtgattgaagatggcccagtcattggagaagcattagcccgtgtgaaacgccaagaaacgaagtggagaaacaagttaacacaactgcgaacggaaacacaagcgatttatacacgagcaaaacaagccattgataatttattcacaaatgcacaggactctcacttaaaaataggtgctacatttgcgtcaattgtggctgcaagaaagattgtccaatccatacgtgaagcgtaaatgtcatggttatctatcgtcccaggtgtaaattatcccatttttacagaattgaatgagagagtacagcaagcatttcaattacatgatgtacgaaatgtcgtgtgtaatggccgattccttaatggaacatctgattggattataacctctgacgtaaaggtacaagaagaaaatgggaataacgtattagttctttccaattgggatgcgcaagtattatacaatgcatgaagctctatcaataccacggatatatcttgcgtgtaacggcacgtaaagaaggattgggagaaggatatattacaattacggatgaagaagggcatacagatcaattgacatttggtgcatgtgaggagatagatgcatcctaacacgttcgtatccacaggttatatgacaaaagaactagaatttttcccagatacagagaaggtgcgtatagaaattggagaaacagaagaaatattccaggtggaaagtgtagaattatttttgatgaaagatctatgttaa

SEQ ID NO: 283 - DNA, 3525 bp, Bacillus thuringiensis
  source 1..3525: mol_type = genomic DNA
atgagtccaaataatcaaaatgaatatgaaattctagatgcttcatcatctacttctgtatccgatagttctgttagataccctttagcaaacgatcaaacgaccacattacaaaacatgaactataaagattgtctgagaatgtctgagggagagaatcctgaattatttggaaatccggagacgtttattagttcatctacggttcaaactggaattggcattgttggtcaagtactgggggctttaggggttccatttgctggacagatagctagtttttatagtttcattgtcggtcaattatggccatcaagtaccgtgagtgtatgggaaatgattatgaaacaagtggaagatctaattgatcaaaaaataacagattctgtaaggaaaacagcgcttgcaggactacaaggattaggagatggcttagacgtatatcagaaatcacttaagaattggctggaaaatcgtaatgatacaagagctagaagtgttgtggtgacccaatatatagctttagagcttgattttgttgctaaaatcccatcttttgcaatatctggacaggaagtaccattattatcagtgtatgcacaagcagcgaatttacatttgctattattacgagatgcttccatttttggagcagagtggggattcacaccaggagaaatttccacattttatgatcgtcaggtgacacgtaccgcccaatactcggattattgtgtaaagtggtataacactggcttagataaattaaaaggtacgaatgctgcaagttggctgaagtatcaccaattccgaagagaaatgacattactggtattagatttagtagcgttatttccaaactatgacacacgtacgtatccaatcgaaacaacggcccaacttacacgggaagtgtatacagatccaatagtatttaacagagaaacaagtggtggattttgtaggcgttggtcacttaacagtgatatttctttttcagaagtcgaaagcgctgtaattcgttcaccacacctatttgatatactcagtgaaatagaattttatacaacaagagcggggcttcccttgaataatacggaataccttgaatattgggtaggacattctataaaatataaaaatacgaatgcctcatcagcattagaacgtaattacggtacgattacttctaacaaaatcaagtattatgatttagcaaataaggatatctttcaggttcgatcattaggggcggatttagctaattactacgcacaggtatatggagttccgtacgctagttttacactgcttgacaagaatacaggatcaggatcagttggaggttttacgtactcaaaaccacatacaactatgcaagtatgtacacaaaattacaatacgattgatgaaatccctccagagaatgagccacttagtagagggtatagccatagattatctcatatcacctcttattctttttctaagattgctagtagtcctgctagatatggcaatctccctgtatttgcttggacacatcggagtgcggatgttacaaatacagtttattcagataaaattactcaaattccagttgtaaaagggatcgacctcgggagcacaagtacgattgtaaattttgaatacaatggaggaagtatagtcaaagatactaaatcatcaactcataataactctctttcacgaatagtgagtttaatgataaaaaccgaggatccaaatccaaattcccgctctttatatcgtattagggttaagtatgctgctgatgtgcctggaactttccgactgcatattcaaaatacttccccggttacagtaccctttactgcgacgatgagcggtactaatttacaatacagttcctttaaatatatagaatatataggttactttaataatagagaagttggtttttctattgagtcaagtacatcacagggtagaacacgtaatgtatatatcgacaaaatcgaattcatcccggtagatgcgacatatatagcagaagaagacctagaggtggcaaagaaagctgtgaatggcttgtttacgaatacaaaagatgccttacagacaagtgtaacggattatcaagtgaatcaagcggcaaacttagtagaatgcctatccgatgagttatacccaaatgaaaaacgaatgttatgggatgcagtgaaagaggcgaaacgacttgttcaggcacgtaacttactccaagatacaggctttaataggattaatagagaaaacggatggacgggaagtacgggaattgagattgtggaaggagatgttctgtttaaagatcgttcgcttcgtttgacaagtgcgagagagattgatacagaaacatatccaacgtatctctatcaacaaatagatgaatcacttttaaaaccatatacaagatataaactaaaaggttttataggaagtagtcaagatttagagattaaattaatacgtcatcgggcaaatcaaatcgtcaaaaatgtaccagataatctcttgccagatgtactccctgtcaattcttgtggtgggatcgatcgctgcagtgagcaacagtatgtagacgcgaatttagcactcgaaaacaatggagaaaatggaaatatgtcttctgattcccatgcattttctttccatattgatacaggtgaaatagatttgaatgaaaatacaggaatttgggtcgtatttaaaattccgacaacaaatggatacgcaacactaggaaattttgaattggtagaagaggggccattgtcaggggaaacattagaacgagcacaacaacaagaacaacaatggcaagacaaaatggcaagaaaacgtggggcatcagaaaaagcatattatgcagcaaagcaagccattgatcgtttattcgcagattatcaagaccaaaaacttaattctggtgtagaaatgtcagatatgttggcagcccaaaaccttgtacagtccattccttacgtatataatgatgcgttaccagaaatccctggaatgaactatacgagttttacagagttaacaaatagactccaacaagcatggaatttgtatgatcttcgaaatgctataccaaatggagattttcgaaatggattaagtgattggaatgcaacatcagatgtgaatgtgcaacaactaagcgatacatctgtccttgtcattccaaactggaattctcaagtgtcacaacaatttacagttcaaccgaattatagatatgtgttacgtgtcacagcgagaaaagagggagtaggagacggatatgtgatcatccgtgatggtgcgaatcagacagaaacactcacatttaatatatgtgatgatgatacaggtgttttatctgctgatcaaactagctatatcacaaaaacagtggaattcactccatctacagagcaagtttggattgacatgagtgagaccgaaggtgtattcaacatagaaagtgtagaactcgtgttagaagaagagtaa

SEQ ID NO: 284 - DNA, 3525 bp, Bacillus thuringiensis
  source 1..3525: mol_type = genomic DNA
atgagtccaaataatcaaaatgaatatgaaattatagatatggcaccttctacatctgtaaccaatgattctaacagatacccttttgcgaatgagcccacaaatgcattacaaaatatgaattataaggattatttaagaatgtctgagggatattctcctgaatatttaacaagcctaagtccttacagccagtttggcacagttgataagatcatcagtattattagtctattgaatagtgctgcaggtattcctggtcttgatttttttactggattgctgcaatttattcttgacttctttgcaccagaggatccgtgggcagagttaatggaactagtggaacaactcatagatcaaaaaataacagttgctacaagagaaaaggcgctcgcagaattaagaggactgataaatggataccttgtatatcagcaatcattagaaagttggctggaaaatccaaatgctacaagagctagtatagttcgagaacaatatgtcgctttagaacttgattttgttacttcgatttcatcttttgcgatagctggacaggaagtaccgttattagccgtgtacgcacaagctgctaatttacatttgttattattgagagatgtgtcaatatttggagaagaatggggattaacagtaaatgaggttaataccttctatattcgtcaaatgacttatacaactgagtatagtgattattgtgtaagaatttataatactggcttaaataaattaaaaggatctagtgcatctagttgggttgattataatcgctttcgtagagaaatgaacttactagtactagatattattgcgttatttccaaactatgatgttcgtaggtatccaatggaaacaacaacggaattaacaagagtagtttacactgatccaattgtgtttgacgaaaggaagggggtggcgtcgactcatagttggacggcgattgcaccatctttctcaagtatagaatctctaactcgacgaccaggattatttacatggttagatcaactaactattttttcgaaacgcatatcgcaacctagtgtatttataaatagttgggcggggcataagattagcacctttagaacacaaaaaacagatatactcataaataccacccatggagatactaataatcctataaaagaatttgtagtagataccaaaaaagtagaagatatttatcaaacgatagcatacccacatgcagtagcaaatgaagtattctatttattcggtgtcccaaaagttgattttaatatggtacctgcaggtggctctgcaaactctgcacacaccctcattttttctgatagtacgggagggagactggaaagtattacgaagaactcagaagcagaattacctccaacagagtcattatcagatacacctcaaccaaaccaagtaacttattctcacagattagattatgctacaataattaaagcaaataaaagttatggaagtgggtatattccattattaggttggacccatcggagtgtagatcgtaataatacaatttatccgaataaaatcactcaaataccagcagtaaaagctttctcatatactgaatcatttaatgtaaatgttattgcaggtccaggattcacaggaggagatttaataagtttaggtcatttagagaatatttatatgaaattaaacgttccaaatcctcaaaaattccgtgttcgtattcgttatgctgctagtacaacttcgtatttgcaaataactgggctatctaatttagctcagtctgatcgtttcgaacagacgtattctaatgaaaatgaaaacaatttgatgtttgaaaattttcaatatgtagaacttagaaatattttttcggtagatgctccattagaaaatcatcaagtaagtatacaaaattatcaaggtaatggttttgttattatagaccgaatcgaattcatcccagtaaatgcaacatatgaggcagaacaagatttagattcggcaaagaaagcagtgaataccttgtttacgaatacaaaagatggtttacgaccaggggtaacggattatgaagtgaatcaagcggcaaacttagtggaatgcctatcggatgatttgtatccaaatgaaaaacgcttgttatttgatgcagtgaaagaggcaaaacgactcagcgaggcacgtaacttactacaagatccagatttccaagagataaatggagaaaatggatggaccgcaagtacaggaattgaggttgtagaaggagatgctctatttaaagggcgttatctacgcctaccaggtgcgagagaaatggatacagaaacgtatccaacgtatctgtatcaaaaagtagaggaaggtgtattaaaaccatacacaagatatagattgagagggtttgtcggaagcagtcaaggcttggaaatttccacaattcgtcatcagacgaaccgaattgtaaaaaatgttccagatgatttattaccagatgtacctcctgtaaactctgatggtagaatcaatcgatgcagcgaacaaaagtatgtgaatagccgtttagaaggagaaagaggattaccaaatgggaatcgttctgctgaagcgcatgaattctctctccctattgatataggagagctggattacaatgaaaatgcaggaatatgggttggatttaagattacggacccagagggatatgcaacactcggtaaccttgaattggtagaagagggaccattgtcaggagacgcactagaacgcctgcaaagagaagaacaacagtggaagcttcaaatgacaaaaagacgtgaagagacggatagaaaatatacggcagcaaaacaagcggtagatcgtttatatgcagattaccaagatcaacaattgaatccaaacgtagaaattacggatattactgcggcccaaaacctgatacagtccattccttatgtatataatgaaatgttcccagaaatacaagggatgaactatacgaagtacacagagaaaacaaatcgactccaacaagcgtggggtttgtatgatcaacgaaacgccataccaaatggtgatttccgaaatgaattaagtaattggaatacaacatctggtgtaaatgtacaacaaatcaacaatacgtctgtcttagtcatgccaaactgggatgggcaagtttcgcaacagtttacagttcaaccgaatcaaagatatgtattacgagttactgcaagaaaagaaggggtagggaatgggtatgtgactatccgtgatggtggaaatcaaacagaaacgcttacgtttagtgcaagcgattataacacagatagtgtgtataatacgcaagtgtcgaatacaaatgggttgtacaatgagcaaacaggatataccacaaaaacagtgacattcatcccatatacagatcaagtgtggattgagatgagcgagaccgaaggtatgttctatatagaaagtgtcgaattgattgttgacgtagagtaa

SEQ ID NO: 285 - DNA, 3474 bp, Bacillus thuringiensis
  source 1..3474: mol_type = genomic DNA
atgagtccaaataatcaaaatgagtatgaaattatagatgcgtcatcacctacttctgtatctaataactcagtgaaataccctttagcaagtgatcaaacgaccacattacaaaatatgaactataaagattatctgagaatgtctgagggagagaatcctgaattatttggaaatccagagacgtttattagtgcgcaggatgcggttggaactgggattgatattgtgagtaaactactaggtagtttaggggttccacttgttgggcaagccgcaacggcacttaaatggattataggtaaattgtggccttcttcaggaaacccgtgggatgatttgatgacggcagtagaagaactcataaatcaaaaaatagaagcatatgcaagaagtaaggcacttgctgaattgggtgtttcgggaagagctgtaaaatcctatcaaaccgcacttgaagagtggcaaaaaaacccgaataacgcgcgaagcgcagcacttgtaagggaaagattttcagatgcagaacatacattgcgtactcaaatgagtttatttaccgttcgtggttatgaaattccgcttttagcaacatatgcacaagctgccaatttgcatttgtttgtaatgaaggatattcaaatttacgggagagaatggggatatactcagggagatattaaccttttctatcgagaacaagtagaatttacaggggaatactctgattattgtgttaagtggtacaatgctggcttagataaattaagaggctcgactgctctacaatggattaactataatcgtttccgcagagaaatgacagtgatggcactggatatagttgcattattcccaaattatgacatacgcatgtatccaatgaaaacaaccgcagaattaacgcgaagaatttatacagatccgcttggttatacgggaagtgggtctaacacgccaccatggtataattatggatattctttctcatggatagaaaataatgccatgccagcacctggattgttccagtggttacaaggaattgggatttatactaaatttgctcgtataactccattttatgcgaactattggtcaggacatactgtattttataaatttactaacgattctactgagagacgtgttcagtatggagatacagatactccagaattagatagttcttcctttgaaaatgttgacatttataaggtttcagcatcagttggttcgtacaaaagtaataccgtactattaccaacttttaaagctacttttgagggggtaaatcaaaataatcagttaaagacctttaggtatcaaaaagaatctaatgtcccaagtcaaacgaaaaactcaaccacagagctgcctgttcagttatcaactccgcctacttacggagattctgaacagtacagtcatagactagcctatgtttttgatgccccaatcgattcatatacaggcatatatcgcatgtatggatttgcccctattcttggttggacacatattagtgtaagtcgtgacaataggattgatccagataaaattactcaaattccagctgtaaaggcatatgctgagggtcttgctaattatatcaaagatccggggtttacaggaggagatttattagctttaggtagaaactcaaatacttcattgattgttaatttttcgaagcctcaaacataccgtattcgtattcgttatgctgctagtaaaacttcgtattttcaactacgtgggctgcataatatagctcagtctcagcgtttcgaagcgacgtattctaataaaaatgaaaacgatttgacatttaacgattttaaatatgtagaaattcaaaaaactgtttcaatagacaatccatcagaaagtcgtagtataagtatatacactcaatcagatacagaattacttattatagacaaaatcgaattcatcccagtagatgcaacatttgaagcggaacaagacctagatgtggcaaagaaagcggtgaatggcttgtttacgaatacaaaagatgccttacagacaagtgtaacggattatcaagtcaatcaagcggcaaacttagtagaatgcctatccgatgagttatacccaaatgaaaaacgcatgttatgggatgcagtgaaagaggcgaaacgacttgttcaggcacgtaacttactccaagatacaggctttaatgtaataaatggagaaaacggatggacgggaagtacgggaattgaggttgtggaaggagatgttctgtttaaagatcgttcgcttcgtttgccaagtgcgagagagattgatacagaaacatatccaacgtatctctatcaacaaatagatgaatcgcttttaaaaccatatacaagatatagactaagaggttttataggaagtagtcaagatttagagattaaattaatacgtcatcgggcaaatcaaattgtcaaaaatgtaccggataacctcttgccagatgtacgccctgtcaattcttgtggtggagtcgatcgctgcagtgaacaacagtatgtagacgcgaatttagcactcgaaaacaatggagaaaatagaaatatgtcttctgattcccatgcattttctttccatatggatacaggtgaaatagatttaaatgaaaatacaggtatttgggtcgtatttaaaattccgacaacaaatggatacgcaacattaggaaaccttgaattggtagaagaggggccattatcaggagacgcactagaacgcttgcaaagagaagaacagcagtggaagcttcaaagaaccaaaagacgtgaagagacggatagaaaatatatggcagcaaaacaagccattgatcgtttattcgcagattatcaagaccaacaactcaattctggtgtagaaatgtcagatttgcttgcagctcaaaaccttgtacagtccattccttatgtgtataacgaaatgttcccagaaatccctggaatgaactatacaaatttcacagagttaacaaacagactccaacaagcatggaatttgtatgatcttcgaaatgctataccaaatggagattttcgaaatggattaagtgattggaatgcaacatcagatataaatgtgcaacaactaaacgatacatctgtccttgtcattccaaactggaattctcaagtgtcacaacaatttacagttcaaccgaattatagatatgtattacgtgtcacagcgagaaaagagggagcaggagacggatatgtgatcatccgtgatggtacaaatcagacagaaacactcgcatttaatacatgtgataatgatgcaggtgttttatctactaatcaagctagctatatcacaaaaacagtggaattcacaccatctacagagcaagtttggattgacatgagtgagaccgaaggtgtattcaacatagaaagtgtagaactcgtgttagaagaagagtaa

SEQ ID NO: 286 - DNA, 2094 bp, Bacillus thuringiensis
  source 1..2094: mol_type = genomic DNA
atgaatccatatcagaataagaatgaatatgaaatattggatagttcacaaaataactttaatatgtctattaatcatttacaatatccattaaaaaatagtccatatcctcaattttctatagacaattgtaggcgtagtaatactgctacttgggttaataatattggggatgcagttagtgaatcaatatctttggtgtcaacaatattggggatttttacagaacctaatttgtggggagtattttctgcattaattggtcttctagataggatgagaggtgctctgggaacaccttctatagctgcattatctatatgtgatttgctagaaattattgatgaacgagtaaatcggagtgttttgaatgacggaatcgctgattttaatggttcattagctctatttggaaatttcttgtccgcattaaattcctggagaaataatccaaacaatagtactgctgatgagcttcgttttcgttttagagcatctgattcagaatttgataggagtttaacaaatggatctttaacacatggtggttcattagctagacaggatgcacaaatattattattaccttcttttgcaaaagctgcatattttcacttatttttattaaatgaggctattacaagtggatctaattggggtctggagattaggcctactataaattatcaagaaaaattagaaaatagtattagaaattacaccaattattgtgtacattggtacaatcagggtttagaggaaatacgccgccggaataatagtggtgaaaattggttagtatttcacagattccgtagagatatgacattgcaagtattagatctagtagcaacatttccgaattttgatactaatcgatattctacttcaatgccaataactactcaattaagtagggtgatttatacagatccaatcggttgtgtaagtcaatcccatctaaatagtaattggtttggcccagtaaatggtactaattttacaagtttagaaaatgaaattcctagtcctaccctttctcaatttttaaattctatagatttagttgatcagccgcttagatggggtgttggaactaatggaggaaatacatggcaaggaaatacaaatagttttaatttttcctcttcatctactgttttccatgaaagttatggaagacgaactggtcagaatattatccgtgggctgaatggtagggatgtttttagaatagattcgagacctatttctctagatggtcatacattcggagttaatagagtagaatttcatcatactactagttctcaaaactctatatatacaggatatttgagaacatccggacttaatagaccagtggttcagaatgtccggacgtttttaccaggagaaaattctgatataccaaatcgagaagattatactcatagattaagtagggtagcaaatataacaggtgggcttcgacatgtagcagttcgtgaggatcaaagttcttctttattgttatatggctggacacataaaagcttaactcgtgaaaatatgtataatcttaatgaaatttttcaaatacctgctgtaaaaacaatgaacacacctggtattcaagtaattgcaggacctggatctacaggtggggatttattaagactaaatcttggtgctagagtaacttataattgtagacctgctcgtccattagaaacaccaatggtagtacatgtacgtgttcgttatgctagtgtaggaagttctacaataagaatagagtttactgatccatctggttcatttaatccacaaacacttgctttacctgatacaaattcatcattaaataatcttcaatatcaaaatttcaacatggttaccactaatttcgcacgtggtacgagtataatgcaaggtaatttttcaataagtattataaatatgaatggagctaatttagctttagataaaattgaaattataccggttcgtattggtcgaaacacctcagaacaagtaaaagaatttattgataaactgggttgtgttgcaaagtttgaaaaatatagttatagtttaagcggttctgaataa

SEQ ID NO: 287 - DNA, 2028 bp, Bacillus thuringiensis
  source 1..2028: mol_type = genomic DNA
atgaatccatatcaaaataagaatgaatatgaaatattcaatgctccatccaatggttttagcaagtctaataactattctagatatccattagcaaataagccaaatcaaccactgaaaaacacgaattacaaagattggctcaatgtgtgtcaagataatcaacaatatggcaataatgcggggaattttgctagttctgaaactattgttggagttagtgcaggtattattgtagtaggaactatgttaggagcttttgctgcccctgtcttagctgcaggtataatatcttttgggactttgttgccgatcttttggcaaggatctgaccctgcaaatgtttggcaggatttgttaaacatcggaggaaggcctatacaagaaatagataaaaacataattaatgtactaacttctatcgtaacacctataaaaaatcaacttgataaatatcaagaatttttcgataaatgggagccagcacgtacacacgctaatgctaaagcagtacatgatctctttactaccttagaacctataatagataaagatttagatatgttaaaaaataatgctagctatcgaataccaacactccctgcatatgcacaaatagctacttggcacttgaatttattaaaacatgctgctacctattacaatatatggctgcaaaatcaaggtataaatccaagtactttcaattcatctaattactatcagggctatttaaaacgtaaaatacaagaatatactgactattgtatacaaacgtacaatgcaggactaactatgattagaactaatactaacgcaacatggaatatgtataatacttaccgtttagaaatgactctaactgtgttagatcttattgctatttttccaaattatgacccagaaaaatatccaataggagttaaatctgaacttatcagagaagtttatacgaatgttaattcagatacatttagaaccataacagaactagaaaatggattaactagaaatcctacattatttacttggataaaccaagggcgtttttacacaagaaattctcgagacattcttgatccttatgatattttttcttttacaggtaaccagatggcctttacacatactaatgatgatcgcaacataatctggggagcggttcatggaaatattatttctcaagacacatccaaagtatttcctttttatagaaacaaacctattgataaggtcgaaattgtcagacatagagagtactcagatataatatatgaaatgatatttttttcgaatagcagtgaagtatttcgatattcatccaattcaacaatagaaaataattataaaagaactgattcttatatgattccaaaacaaacatggaaaaataaagaatatggtcatactctatcgtatataaaaactgataattatatattttcagtagttagagaaagaagaagagttgcatttagttggacacatactagtgttgatttccaaaatacaatagatttagataacatcacccaaatccacgctctaaaagctttgaaggtaagttctgattcgaaaattgtgaaaggtcctggtcacacaggtggagacttggtaattcttaaagatagtatggattttagagttagatttttaaaaaatgtttctcgacaatatcaagtacgtattcgttatgctactaatgctccaaagacaacagtattcttaaccggaatagatactataagtgtggagctccctagtaccacttcccgccaaaacccaaatgctacagatttaacatatgcagattttggatatgtaacatttccaagaacagttccaaataaaacatttgaaggagaagacactttattaatgaccttatatggtacaccaaatcattcatataatatatatattgacaaaatcgaatttattccaatcactcaatctgtattagattatacagagaagcaaaatatagaaaaaacacagaaaatagtgaatgatttatttgttaattaa

SEQ ID NO: 288 - DNA, 1941 bp, Bacillus thuringiensis
  source 1..1941: mol_type = genomic DNA
atgaattatatggaagatagttctttagatactttaagtatagttaatgaaacagactttccattatataataattataccgaacctactattgcgccagcattaatagcagtagctcccatcgcacaatatcttgcaacagctatagggaaatgggcggcaaaggcagcattttcaaaagtactatcacttatattcccaggttctcaacctgctactatggaaaaagttcgtacagaagtggaaacacttataaatcaaaaattaagccaagatcgagtcaatatattaaacgcagaatatagggggattattgaggttagtgatgtatttgatgcgtatattaaacaaccaggttttacccctgcaacagccaagggttattttctaaatctaagtggtgctataatacaacgattacctcaatttgaggttcaaacatatgaaggagtatctatagcactttttactcaaatgtgtacacttcatttaactttattaaaagacggaatcctagcagggagtgcatggggatttactcaagctgatgtagattcatttataaaattatttaatcaaaaagtattagattacaggaccagattaatgagaatgtacacagaagagttcggaagattgtgtaaagtcagtcttaaagatggattgacgttccggaatatgtgtaatttatatgtgtttccatttgctgaagcctggtctttaatgagatatgaaggattaaaattacaaagctctctatcattatgggattatgttggtgtctcaattcctgtaaattataatgaatggggaggactagtttataagttattaatgggggaagttaatcaaagattaacaactgttaaatttaattattctttcactaatgaaccagctgatataccagcaagagaaaatattcgtggcgtccatcctatatacgatcctagttctgggcttacaggatggataggaaacggaagaacaaacaattttaattttgctgataacaatggcaatgaaattatggaagttagaacacaaactttttatcaaaatccaaataatgagcctatagcgcctagagatattataaatcaaattttaactgcgccagcaccagcagacctattttttaaaaatgcagatataaatgtaaagttcacacagtggtttcagtctactctatatgggtggaacattaaactcggtacacaaacggttttaagtagtagaaccggaacaataccaccaaattatttagcatatgatggatattatattcgtgctatttcagcttgcccaagaggagtctcacttgcatataatcacgatcttacaacactaacatataatagaatagagtatgattcacctactacagaaaatattattgtagggtttgcaccagataatactaaggacttttattctaaaaaatctcactatttaagtgaaacgaatgatagttatgtaattcctgctctgcaatttgctgaagtttcagatagatcatttttagaagatacgccagatcaagcaacagacggcagtattaaatttgcacgtactttcattagtaatgaagctaagtactctattagactaaacaccgggtttaatacggcaactagatataaattaattatcagggtaagagtaccttatcgcttacctgctggaatacgggtacaatctcagaattcgggaaataatagaatgctaggcagttttactgcaaatgctaatccagaatgggtggattttgtcacagatgcatttacatttaacgatttagggattacaacttcaagtacaaatgctttatttagtatttcttcagatagtttaaattctggagaagagtggtatttatcgcagttgtttttagtaaaagaatcggcctttacgacgcaaattaatccgttactaaagtag

SEQ ID NO: 289 - DNA, 1941 bp, Bacillus thuringiensis
  source 1..1941: mol_type = genomic DNA
atgcaaaataacaactttaataccacagaaattaataatatgattaatttccctatgtataatggtagattagaaccttctctagctccagcattaatagcagtagctccaattgctaaatatttagcaacagctcttgctaaatgggctgtaaaacaagggtttgcaaaattaaaatccgagatattccccggtaatacgcctgctactatggataaggttcgtattggggtacaaacacttttagaccaaagattacaagatgacagagttaagattttagaaggtgaatacaaaggaattattgaggtgagtaaagtttttactgattatgttaatcaatctaaatttgagactggaacagctaataggcttttttttgatacaagtaaccaattaataagcagattgcctcaatttgagattgcaggatatgaaggagtatccttttcactttttactcagatgtgtacatttcatttgggtttattaaaagatggaattttagcaggaagcgattggggatttgctcctgcagataaagacgctcttatttgccaattcaatagatttgtcaatgaatataatactcgactgatggtattgtactcaaaagaatttggacggttattagcaaaaaatcttaatgaagccttgaactttagaaatatgtgtagtttatatgtctttcctttttctgaagcatggtctttattaaggtatgaaggaacaaaattagaaaacacgctttcattatggaattttgtgggtgaaagtatcaataatatatctcctaatgattggaaaggtgcgctttataaattgttaatgggagcacctaatcaaagattaaacaatgttaagtttaattatagttatttttctgatactcaagcgacaatacatcgtgaaaacattcatggtggcctgccaacatataatggaggaccaacaattacaggatggatagggaatgggcgtttcagcggacttagttttccttgtagttatgaattagaaattacaaaaataaaacaggaaataacttacaatgataaagggggaaatttcaattcaatagttcctgctgctacgcgcaatgaaattctaactgctaccgttccaacatcagctgatccattttttaaaaccgctgatattaactggaaatatttctctccgggtcttttctctggatggaatattaaatttgatgatacagtcactttaaaaagtagagtaccaagtattataccttcaaatatattaaagtatgatgattattattttcgtgccgtttcagcctgtccaaaaggcgtatcacttgcatataaccatgattttttaacgttaacatataataaattagaatatgatgcacctactacacaaaatatcattgtaggattttcaccagataatactaagagtttttataggagcaactctcattatctaagtacaacagatgatgcctatgtaattcctgctttacaattttctacagtctcagatagatcattcttagaagatacaccagatcaagcaacagatggcagtattaaatttacggatactgttcttgggaatgaggcaaaatattctattagactaaatactggatttaatacagctactaggtatagattaattatacgttttaaagcgcgtgctcgtttggctgctggtatacgtgtacgttctcaaaattcagggaataataagttattaggtggtattcctgtagagggtaattctggatgggtagattatattacagattcatttacttttgatgaccttgggattacaacttcaagtacaaatgctttctttagtattgattcagatggtgtaaatgcttctcaacaatggtatttgtctaaattaattttagtaaaagaatccagttttacgactcagattccattaaaaccatag

SEQ ID NO: 290 - DNA, 4391 bp, Bacillus thuringiensis
  source 1..4391: mol_type = genomic DNA
gaaaattcgagaattaatcagacatgcaggcgccaaaaacgtagtattggatggcagagatggagtaatgaatatctctatggtgtactagggctctattgggactggaaagttcgtccccttgaaagctcaggaagatattgataaaagtgtctgccatttgataggtctcataacccttttgatgaagtttatggggtgagctgcttgagggaaaacctcacgagcagttcttatggggaggggctggaaacgggttataactgataccgcgccagtcctttacccgacaacgaacttttgcttggttagaaaattaccgcaggctttggaaaaactgtgaacgaacacttgaaaatagcagacaaagttgcttattggcagctgtggctattttattaaaaagattccaaacaggttctcagaaaatagttgtaattcatcttgaatcgaaagattcataaaaaacgtcatcctttctagctttttagaaagaataacgttttttgacacttgggggtagtcttatttcttaagttgatgggcatgcaacagaaccctaaaaaatcaataattcaacaaaaataatggggatatttgttgaattattgcaacaggaatacatacgtagattgcgaatatttagaagtacaccctacatattattggttaggtggaatgaattataaaaaatgatgggaataagggaggaacgaagatgcattattatgggaataggaatgaatatgacatattaaatgcttcatcaaacgattcaaacatgtctaatacttatccgaggtatccgttagcaaatccacaacaagatttaatgcaaaatacaaattataaagattggcttaatgtatgtgaagggtatcatatagaaaatcctagagaagcaagcgttagagctggacttggtaagggattaggtatagttagtacaatcgtagggttctttggtggttctattatcttagatacaattggattgttttaccaaatttcagagctactttggccagaggatgatacccagcaatacacttggcaagatattatgaatcatgtagaagatcttatagacaaacgaataactgaggttatacgaggaaatgcaattagaacattagcagatttacagggtaaagttgatgattataacaattggttgaagaaatggaaagacgatccaaaatctacaggtaatttaagcaccttagtaaccaagtttacggctcttgattcagattttaatggtgctataaggacagttaataatcaggggagtccaggttatgagttacttttattgcctgtctatgcacaaattgcgaatctgcatttacttttattacgggatgctcagatttatggagataaatggtggagcgcacgagctaatgctcgtgataattattaccaaatacaattagagaaaacaaaggaatatacagaatattgtataaattggtataataagggtttaaatgattttagaacagcaggtcaatgggtaaactttaatcgttatcgtagagaaatgactcttactgtattagatattatttcaatgttccctatttatgacgcgagattatatcctacagaagtaaaaaccgaactaactagggaaatttattcagatgttattaatggggagatatatggacttatgactccttatttttcttttgagaaagctgaatcactttatacaagggcaccccatctcttcacttggctaaaaggatttcgatttgtaaccaattctatttcttattggacatttttatcaggtggtcaaaataagtattcttatactaataattctagtattaacgagggctcttttaggggacaggacacagattatggtgggacttcttctaccattaatattccatcaaattcgtatgtatataatttatggacggaaaattatgaatatatttatccttggggtgatcctgtaaatattacaaaaatgaatttttctgtaacagataataattcttcaaaagaattaatttatggtgcacacagaacgaataaacctgttgttcggacagattttgattttctcactaataaagagggaactgagttagcaaaatataatgattataatcatattttatcctatatgttaattaatggggaaacgtttggtcagaaacgtcatggttattcgtttgcttttacacatagtagtgttgatcctaataataccattgcagcgaataaaattacgcaaattcctgtagtgaaagcttcgagtataaatggatcgatttcaattgaaaaaggtcccggatttacgggaggagatttggtaaagatgagagcagattcaggtttaactatgcgttttaaagctgaattattagataaaaaatatcgtgttcgaatacgttataaatgtaactacagttctaaattaatactacgaaaatggaaaggggaaggttatatacaacaacaaattcacaatatttctcccacatatggagccttttcttatttagagtcttttactataactacgacagaaaatatatttgatttgacaatggaggtaacatatccgtatggtagacagtttgttgaagatataccatctcttatattagataaaatcgaattcctcccaactaactgataccattcacaggaaatatgaggaaaaatatgaattagaaagatcacaggaaacatttaatagtatatttgttgattaaaacaaagtactaacgtagatggtatagctgtttgaaaaaataagaaaaaaggttgtgaattttatgcttacaagtggtgcgaaaaatatgttaaaactcgaaacgacagattatgaaatagatcaaatggcgaatgctatagaaaatatgtcaggtgaacaatattcacaggaaaaaatgatgcaatggcatgacataaaatatgccaaacaattgagtcaagcacgtaatttacttcaaaatggtgattttgaggatttatttagtggatggactacaagtaatcagatgtccattcaggcagataatgcaacttttaaagggaactatctgcatatgtctggggcgagagacatatatggaacgatattcccaacgtatatataccaaaaaattgatgaatccaaattaaaaccgtatacgcgttatctagtcaggggatttgtgggaagtagtaaagatctagaattaatggtaatgcgttatggaaaagaaattgatacagtaatgaatgtaccaaatgacataccgtacgtaccttctatgccggtctgtaacgaattatatgatggtcaacaaccgtatccaaataggcatgtaggatattataatccaatgccagtttctcagccttcttacacatccgatacttgtcagtgtacgcccggcaaaaaacatgtggtatgtcatgattctcatcaattcaagtttcatattgatacgggggaagtagattacaatacaaatctaggaatttgggtgttgtttaaaatctcttcacccgatggctacgcgacattagataatttagaagtaattgaagagggaccagtaagaggcgaagcagtgacacatgtaaaacaaaaggaaaagaaatggaatcagcaaatggagaaaaagcgcatggaaacaaagcgagtctatgaccgagcaaaacaggcggtagatgcattatttacaggagaagagttaaactatgatgttacattgtcacacattaagaacgccgatgatttggtacagtcgattccatatgtacacaatgagtggttaccggattttccaggcatgaactatgatatataccaagagttaaacgcgcgtatcatgcaagcacgctatttatacgatgcacgaaatgtcataacaaatggggattttgcacaaggattacaagggtggcatgcggaaggaaaagtagaagtacagcaaatgaacggaacgtctgtattagtcttatccaattggagctctggagtatctcaaaaccttcatgtccaacatccacatggatatctgttacgtgtgagtgcgaaaaaagaagggtctgggaaaggctatgtaacgaggatgagttgtaatggtaagcaggaaacacttacgtttacgtcctgtgacggaggatatatgacaaaaacggtagaggtattcccagaaagtgatcgtgtacgaattgaaattggggagaccgaaggttcgttttatattgaaagcatcgaattgatttgtatgaacggatatactagcaataataaccagaatatgagtaatatgtatgatcaaagttatagtgggaattatagtcagaatactagcgatatgtatgatcaaggaggttctgttgcaaagtttgaaaaagaatagaat

SEQ ID NO: 291 - DNA, 3668 bp, Bacillus thuringiensis
  source 1..3668: mol_type = genomic DNA
gactttttttgactatatgcatggcctctattccaacaatcatttttgtagctgtgcgccatgatttgaatccaagcatattccagattcattttttgataaatctatggtcttgttcaattatgttgtttacatatttttttacccgtagcggcatatcatttggtatatttttttcattttttaattctcgtatcgcaacaggataggctttatcaccatcaattgtgattacacgaggttttgtgacatgacaagaagccaatgctttctttagaaaacgcttggtagccttcgcatctcgtttcttacccaaataaaaatcaagggtgtttccttcggaatcgacagcaccatataggtacattttttcgcctttgatttttaggtatgtttcatcctgatcacgcacctttttttagtagtagtaccagtatggccaagttagaaaaatcattttcaagtttttttatgcttttgtaccagaaccgaatatttacctagatctataaatacgtataagattgataaatgttatacattctttcaattacttagtagtgacttccttaagcctacacataatatggattatagaaatattagtatagtgggaggaatcaaaatgaattcttatcagaataagaatgaatatgaaatcttagatgctaagcgaaatacttgtcacatgtctaattgttatcccaagtacccattagcaaatgatcctcaaatgtatttgcgcaacacccattataaggattggataaatatgtgcgaggaagcttcttatgcatcttcaggtccttcacaattatttaaagttggaggttctatagttgctaaaattcttggaatgattcctgaagttggtcctcttttaagttggatggtatctttattttggccaactattgaagaaaaaaatactgtttgggaagatatgataaagtatgtagcaaatctgctaaaacaagaattaacaaatgatacacttaaccgtgccactagtaatttatctgggttaaatgaatctttgaatatatataaccgagctctcgctgcgtggaaacaaaataaaaataatttcgcaagtggtgaacttataaggtcatatataaatgatcttcatatactctttacaagagatattcaatcagatttctcattaggaggttatgaaacagtattattaccttcatatgcaagtgctgccaatcttcatttacttttgttacgtgatgttgcaatttacggaaaagaattaggatatccatcaactgacgtagagttttattataatgagcaaaagtactatacagaaaaatatagtaattattgtgtaaatacgtacaaatcgggtttagaatcaaaaaaacaaataggatggtcagattttaatcgatatcgtagagaaatgactttatccgtattagatatagtcgcattattcccactgtatgatacaggactgtatccgagtaaagatggcaagatacatgttaaagctgaactaacaagagaaatctactctgatgttattaatgatcatgtatacggactcatggttccctatatatcttttgaacatgctgaatctctgtacactcgcaggccgcacgcatttacttggttaaaaggatttagatttgtaacgaattctattaatagttggacctttttatcaggtggtgaaaatagatatttccttactcatggagagggtactatttataatggaccttttttggggcaggatactgaatatggaggaactagttcttatatagatatctctaataattcctctatttataatttatggaccaaaaattatgaatggatttatccatggactgatccagttaatattacaaaaataaatttttctataacagataatagtaattctagtgagtctatttatggtgcggaaagaatgaataagcctactgttcgaacggattttaattttcttcttaacagagcaggaaatggtcctacgacatataatgattataatcacattttatcttatatgttaattaatggagaaacgttcggacaaaaaagacatggttattcatttgcatttactcatagtagtgtagataggtataataccattgtcccagataaaattgtgcaaatacctgctgtgaaaactaatttggtcggtgcgaatataataaagggtcctggtcatacaggtggcgatttacttaaactagaatatgagcgttttcttagtttacgtattaagcttatagcatcaatgacttttcggattagaattagatatgcttctaatatttctggacaaatgatgattaatataggttaccagaatcctacttattttaatattatccctacgacaagtagggactatactgagttaaaatttgaagatttccaattagtggacacatcctatatttactcaggtggcccatcgattagttcaaatacattatggctggataatttttctaatggacctgttattatagataaaattgaatttataccgttgggaattacactaaatcaagcacaaggttatgatacatacgaccagaatgctaatggtatgtatcatcaaaactacagcaattctggctataattataatcaagaatacaatacttattaccaatcgtataacaattaggttgtgttgcaaagtttgaaaaaacacaaccttgtgtgcaaaatatagttatagtttaagcggttctgaataactcctgtaattccttgtacgtcgaaaaagagaagtctggaatgtgacttctcttttgtttgtatatcgcatgaatcgtttcgattcctttcaatgtacgtgaagcatggcggagattttgaaatcctgcggatttaacaaaacggcgcttgatatgtctatgatcttgttcaatgagattatttagatgcttaacggtacaatgtttcgtatgtacatacaaaccgttatgtttcagttttttgagcgcacaaagtaaagcaggagccttgtctgtagtaagaaccgttggttctccaaaatctttaaccagtcgcttcataaacatataagcggcttgatgattgcgtgttttacgaagttgaatatccaaagtatgcccatctccaccaatagcacgataaagatagcgccattcgcctttcactttgatgtaagtctcatctaaatgccatatgaaatgtgcggatttgtttttctttttccaaatttgataaatcagattgccgtattcgtgaacccaacgcatgatggttgttggatgaactgatattccacgttctttcaagatttcagatacatcacgatagcttaaagaaaaacgacaatagtagccaacggctaccaaaataatatcttttttgaattgttttcccttaaaatatcccatgtgatatgctcctcatcccattttctctatataagttccgtttaatattttaacaattgttcagtccctaacctttgaagtaccttttcaggaaattgagaaagatgttctagaaaagaaagaacggatgtttttatttctttctgggatgcatgaaaacgattagagataacactttcttttaatgctttccaaatacgttccaataaattcaaattgggagaatacggcggtaaaaagacgagtgttgac

SEQ ID NO: 292 - DNA, 4807 bp, Bacillus thuringiensis
  source 1..4807: mol_type = genomic DNA
gcttcatttaaaaaactttgcaacagaacctcagtacatttgtttctttttatacgcacatatacatgcctgttttgcatataatattttggtgatattcttcataaaaaaggagtgattttattggtacagttatctgatttattacctagttattataatgtattagcttctccccctacaattttagatgctaaccaagactggttccccacaggtaatgatttcaaaagtgtaataaatgagctgaaagatgcttttactaaatttcaaaaagattttcatactagcgaccttattaacactatacaatccatttataactcttatggctctcaaggaatggattgggtcaatgtggctcaagctgtaataacttttgcttttggttttgtacccggtggatcattagtctctgcaggacttaataaaataataggtatatttttccccaaagaccctaatcctactgtatttgatcaaataaaagccgcagtagaacaattaatactcaattcatttatcacatatgatatacagggcgatataactgaattgaataaactgaaagattattctggaatattagcaaattctatacaagtagcgcttggtcaatcccaatttcaagaattccaacaagtaaatcctactgggccaccgacaaattgtactcataccccctcttgtactttagatccaactaaccctattccaccaaattgtagctgtttattgaattttgtatatcaaaattataataatcacacttccgatataaacacggtattacttcaaatagaaggttctattccaaagatttttgctcttattaatcaatccacaacagcaactactgctcaaaaaaaccaactaaaatctgattatttacaagcatatcttcctttatatgtaatgggcgcaactttagaaatgatatactatagaacatatattcaatttgctgaaacatttcagtatggtttaagtgaacaaaatagtactacactaacggctatgcacaacttacgtcttacaatttctagacgaactacatttctattcaataattttctcccatttttaccaagtataacttcaaatacaaaaggagatttaaattcatatattcaatatacaagacgtataacaataaatgctctggatactgctgtattttggactttactagatccatttgattatcctgtgtccgcaaatcaaacattatcccgtattatttttaatgatattgtaggaccagtagaatgtaaagctggtaaccaaaatagcaataacttactattcaatttttataacgtagatgggcaaccacttccaaataactctattactaattatttttataataatatgcaattaagaggtttgcaattccaaatatataaatatagttcaacctctacttatttctcgacaacatctgatattccaattggatttaaagcttcttatcgtacaaatggtagcgataaaaatattgatcatacacgttctctaccatacggactaaaaggatctacaacaacattaactgatgatatatatatcacgaatcctagttttaatattataaatatgaactcctctcaaacatcaggtcaaattgctacagatgtctcacaaattctatatacacctatttcagatataaaacaaaattgtttttctcaaaacagtccttatttagggaataatagaattcaagctatttatcctctacaacccactaatccaaacacttataatgcttatggtagtacagataaactcggatttttaactacactcatttcaaatgacaccactacaaaccttgtatttacttctgatcctatttatacatttcctgccgaacaagctactgtattatctggaacaaaacttgttgaatatgtgaatggtacagcttctgttcaattacaaaatgggcaaaatgctcaatacacgatagataatacaacaagaattgcaggtcctacacaatttcaattacgagtacatgtagcgacagatccagcagttacagatccaaatgttttaggacaactcgctattacaattgataatcaacgaacacaatatttaactatacccaatacaaatgttgattatagtaatccaataactcttttaaacggtcaacaacttaaccaattacgggtaaaaggaacacaaggtgcttatatgttagtacccgctagtaatctaaataatatcaatgatcgtaataccaatgtttttacattaaatccaaatgcatctatgaatgtaaatattcaaaatacaggaaatctaacagttatattagatcgtattgaattcgttcctatcgattcaacagtaataatcccagcacaaacactatattcaaatcaagcttatactctttgggaatcaacaaatggattaattggaaaacaggctttattagtagtagatgattatttacattttactgttcaatattattaccaatctcaattagtccattctaatgaacaaaatatatatgatgttaattatattggtctatttgataaaattacggctagtactatcgctgatactttagtaaaccttacaaatggaattgtttatttaactactaatacaacaccaacaccaacaccagctgtaccaagcccaattcctcctatatccaatcaaaatataggagctggatttgaatatactgtttgggatggtaataacaaaactggaaataccgtaaattttcaaggattcgctgcaccaaatagtggttccgaaggtttattatttcaatataaatataatgatcaagtaattgacacagatcaagtatcaaaccaattttctatccaacgtaaattagcaggtacaattaataaaattacagcaacaggtggaacaccaaatggagtgtatttaacgataaataatggtggttccgtgagtacaacataaaaaggaggaaaataaaatgaatccatgttctccattccaaaatatacctcaaaggaatttaaatcttcctgtttttattacaaaacaagaattagaacaaattactaaaatggtatctaacttatttttaacaacaaatcctgctttattacattgtttaccacctgatattacgttattagctcctcatgttagtgattattggattgatcaattactaatgaaagttgataaactgtcaactgaattatatggtgtcgaaaaacaagaattacgaaaattattaaatatagccaaacaaatgagtgttgcacgaaataaattaataggtggaaactttgaaacagtagaggcttggacattcggtacacaagcaactgttctttccaattcacctttatttgtagggaattttctatctttagaacctacaaatggtatatggacttcctacgcatttcaaaaaattaatgaatctcaattaaaaccatttacacgttatagtatttctggttttatcgctaatagtcaagggttagaacttacaatttcacgatacggaacagaattacaaactgttataaacattccaattgaaacagcacttcctatttatccaaatccaattccaaattgttgccagccaagtccatgtggatgcgattcttgtcaatatagagattcacatctttttaactattcaattaatgtaggtactttatttccagaattaaatcctggtattgaaattagtttacgcataatcgaaccaaacggaagagccagaattagtaatttagaagtaatagaagagcgtcctcttacagaagaagaaagaagacaaattcaacgaacagaacaattatggctaacaagagtagaaagagaactaaaaatcatttgtgatttatttgaaccaattattaaacaaattaactcctactttccagaaggggattggaacaatcacattttttctcatgtcacatatcaagatttatatagtattgtcataccggcactcccgatcattgaaaattggtctatgacgcatttgacaggtatgtataatcatctagtacgaccgattaaagaagtgatccaacaaattgaacaacaattagaagctcgaaatttacttcataatggaaatttttcaaatggactgacagattggactgtttgtggtgaagcaaccataatacctttaacaaatcaaaatcaagctttattcctttcttattgggattctatggtttcacaaactgttacagttgtaaattttaatccagataaattgtatttattacgtatctatgcaaaaggaaatggaactgttcttgttcaacataatggacacacagaacgtgttaacttcacacaagatttcttccaatcaaaagaacatactttttatctagatatggcaacctttaccgtagatattcaatccaattcaaatgattttacagtagattatgtagaaattatagaaatataaaataaacaaaactacatgtttttacttcatgtagttttttctctctttcttactctattcaagaaacgaggtgattgtatgcaaaaaaaaacaattttaataaattcttcttccacttctagcccctctccttccacctcttctttttcttcttctcaattactacaacaaggatataccaaaaaacaaggttgtaattgtaataaatagacaaacaaaaatagtgtatttaaaaaagttgcaaagtttgagaaatcataagtctgtttacaaaatactcttgtcatttaagcggttctgaataatggctataattctttctacgtcgcaaaagag

SEQ ID NO: 293 - DNA, 2169 bp, Bacillus thuringiensis
  source 1..2169: mol_type = genomic DNA
atgaaagaacaaaatctaaataaatatgatgaaataactgtacaagcagcaagcgattatatcgacattcgtccgatttttcaaacaaatggatctgctacatttaattctaataccaatattacaactttaacacaagctataaatagtcaagcaggagcaattgcaggaaagactgctctagatatgagacatgactttacttttagagcagatatttttcttggaactaaaagtaacggagcagacggtattgcaatcgcatttcatagaggatcaattgggtttgttggaacaaaaggcggaggacttggaatattaggtgcacctaaagggatagggtttgaattagacacatatgcgaatgcacctgaggacgaagtaggcgattcgtttgggcatggggcaatgaaaggatcattccctagtttcccaaatggatatccccatgctggctttgtaagtactgataaaaatagtagatggttatcagccctagctcagatgcagcgaatcgctgctccaaacgggcgttggagacgtctggagattcgttgggatgctcgtaataaagagttaactgcaaatcttcaggatttaacttttaatgacataactgttggagagaagccacgtactccaagaactgcaacttggaggttagtaaatcctgcatttgaacttgatcagaagtatacttttgttattggttcggcgacgggtgcatctaataacctacatcagattgggattatagaatttgatgcatactttactaaaccgacaatagaagcgaataatgtaaatgtcccagtgggagcaacatttaatccaaaaacatatccaggaataaatttaagagcaacagatgagatagatggggatttgacatcgaagattattgtgaaagcaaacaatgttaatacgtcgaaaacgggtgtgtattatgtgacgtattatgtagagaatagttatggggaaagtgatgaaaaaacaatcgaagtaactgtgttttcaaaccctacaattattgcaagtgatgttgaaattgaaaaaggggaatcttttaacccactaactgattcaagagtaggtctttctgcacaggattcattaggcaatgatattacccaaaatgtaaaggtaaaatcgagtaatgtggatacttcaaagccaggggaatatgaagttgtatttgaagtgacagatagctttggtggaaaagcagaaaaagatatcaaggttacagttttaggacagccaagtatagaagcgaataatgttgaattagaaatagatgatttatttgatccattaacagatgcaaaagtaggtctccgtgcaaaggattcattaggtaatgatattacgaaagacgtaaaagtaaagttcaataacgtagatacttcaaattcaggaaagtatgaagttatatttgaagtgacggaccgttttggaaaaaaagcagaaaaaagtattgaagtccttgttctaggagaaccaagcattgaagcaaatgatgttgaggttaataaaggtgaaacgtttgaaccattaacagattcaagagttggcctccgtgcaaaagactcattaggtaatgatattacgaaagatgtgaaaataaaatcaagtaatgtggatacttcaaaaccaggtgaatatgaagttgtatttgaagtgacagatcgttttggtaaatatgcagaaaaaacaattggagttatagtgccagtaattgatgatgaatgggaagatggaaatgtgaatggttggaaattctatgctgggcaagatattaaactgttgaaggatcctgataaagcctataaaggcgattatgtattctatgattctagacacgttgctatttctaaaacaattccactaacggatttgcaaataaatacaaactatgaaattacagtgtatgctaaagcagaaagcggcgatcatcacttaaaagtgacgtataagaaagacccggcaggtccagaagagccgccagttttcaatagactgattagcacaggcacattggtagaaaaagattatagagaattaaaagggacgttccgcgtaacagaattaaacaaagcaccattgataatcgtagagaattttggagctggatatataggtggaattagaattgtgaaaatatcgtaa

SEQ ID NO: 294 - DNA, 3711 bp, Bacillus thuringiensis
  source 1..3711: mol_type = genomic DNA
atggacccaaatgatcataatgaatatgaagtcatggatactggcagcatgggctatcagccaaggtatccccttgcgaatgcacctggtgctgaattgcaacagatgcattacaaagattggatggatatgtgtacgtatggggaatcagtagcattatccgaggggcttagggctgcgctatttgttgctaatagtattatagggataatgctttcaaagattccaattgtgggtcctatagtatcaacaccctttcaaataatgggcgcagtacttccattcttgtggccgccaaacgcacccgaggcccaattttcatgggaaagcctgatgacagctgcggaagagattgctgataaaaagatcgacgcacaggtacgagctaatgcgaatgcagaattagaaggagttcataacgctatacgactctatcaagatgccgtttgcgattggaaacaagatcctaccaatgcccaactgaaggaacaactccgaatacaatatattgctacgaataccgttatctttagtagaatgccgtcttttcgagtacgaggatttgaagtcccattactcagcacttatgtgcaagcggctaatttacatttaatccatttaaaagatggagttcaatttggagaagaatggggaatggactcagcaacagttgatcgattttatagctacctaaaatcagatatagaaatctatacgaattattgtatagattggtataataaagggttatcggatagtatagaatctgaacccacttggaatggttggaatacgttcaataatttccgcagggatatgactcttatggtccttgatttagtttcgatatggccaacatatgacccgagacgctatccccttcctaccaaatcacaattgacacgagaattatatacacaagctatagggagttataaaagtgttgagcctcttctgccccctccatctccatttagatggttacgtgaaatagagttttttttaagagacagtcaggatgaggtggaacagtttgctggttttcaacaggggtatcaatacacgcttgacaccaccatctatcgtccaccagtagttggtacacggacttccctagttgatagtattgctatgggactgggttctgatgatgtagtgtatagaataaagaatatttcctacaatggatggtttccaaaaaaacttgatttttattatactccttccgaacgcgttgaaagtgtaggagagattcgtactgatgctaataatatgattgattatatcggacttggttgtagggcgaaggtgactgaaccttgtgatccttgtacgactaattgtacgattgatactgtgaatacaaccgcatcttgtgacaatcctaatctttatagccatcgattgtcatcgataaacccaagtgctccatacccgggtcaaaattggatgtttagcttttgctacggctggactcatttcagtgtagatgacaacaatttgatagcggctgacagcattactcaaatccccgcagtgaaagcctatagaatagggggatatggcaaagtaatgaaagggcctggttatacaggcggggatttaatggtgttttatggggcaggggaaatcaactggagacttaccattccggacacgacaaaggcttatcgagtgcgagctcgtgtggcaacaatccctacttctcagcctgtagatacagtgaggtataatcagtttgaatacagggatatagaagtaatatctccaacaactactgtacatgagtattccataggattcgatatcactggtgatgactgggggctgttggacaaaatcgaattcatcccaattgaaggatccgtggaagaatatgaagcagaccaagctttagaaaaagccagaaaggcagtgaacgccttgtttacaggtgatgcgaaaaatgccttacaattgaacatcacagattacgcagtggaccaagctgccaaccttgtcgaatgtgtatcagaggagttccatgcccaagaaaaaatgatcctcttagaccaagtcaaatttgccaaacgactcagtcaagcacgcaatctattaaactacggagactttgaatcgtcagattggtctggagagaatggatggagaacaagtcctcatgtccatgtcgcatctaatcatccaatctttaaagggcgctatctccatatgccaggtgcgacaagttctcagttttctaaccatatctatccaacttatgtatatcaaaaggtggatgaatcaaaattaaaatcctatactcggtacatggtacgcgggtttgtcggcaatagtaaggacctagaattactggtagaacgatatggaaaagatgtccacgtggaaatggatgtaccaaatgatattcagtatacgttaccaaggaacgaatgtggtggctttgatcgatgcaaaccagcatcctatccaacaagcacttctcacacatgcacatgtaaagatacggctccaatgcatacggattgtcagtgtcaggacaagatgaatcgtactttggcagatacgtatcacaatgaatcatcgagtcgtgtgatgtatgcggacggattccatgctcatacgtcctgtggatgtaagaacagtgacaggtatcaaaacggaacacgtccatctaaatcttgtggatgcaagaacccacatgtcttcacataccatattgacacaggatgtgtggatcaagaagaaaaccttggtttgtggttcgctttgaaaattgcgagcgaaaatggtgtcgcaaacattgataacctagaaatcattgaagcacagcagttaacaggagaggcgttagcgcgtgtgaaaaaacgggaacagagatggaaacaagaaatgacaaaaaaacgtttagaaacagagaaagctgtacaagcagcgcaaggtgcgattcagaatctgttcacaaacgcgcagcacaatcgtctgaaatttgaaacgctattccctcaaattgtccatgcagagaagctcgttcaacagattccctatgtgcatcacccattcttgagcggggcgctgccaactgtaccaggcatgaattttgaaatcatccaacaactattggcagtgatcggaaatgcccgtgcattatacgagcaacgaaatctcgtgcgtaatggtacattcagctcaggtacaggaagttggaaagtgacagaaggggtaaaagtgcagccattgcaaaacacatctgttcttgttctgtccgaatggattcatgaagcgtcccagcagttacacattgatccaaatcgcgggtatgtgttacgtgtaacagcgcgaaaagaaggcggaggaaaagggactgtaacaatgagtgactgtgcagactatacagagacactgacctttacatcatgtgactttaacacgtctggttcccaaacgatgacaagtggtacattatctggatttgtgacgaagacgctagaaatcttcccagacacagatcgtatccgtattgacatcagtgaaacagaaggtacgtttaaaatagaaagtgtggaactcatttgtatggaacacatggaagaccacatgtatgatatcgccggaaatgtggtggaagagatgcgttacctagattcatctcgttcgatgggtggtacattagatgcgatgtgttatacaaaaattggagagtttggttgttag

SEQ ID NO: 295 - DNA, 1158 bp, Bacillus thuringiensis
  source 1..1158: mol_type = genomic DNA
atgttagatactaataaagtttatgaaataagcaatcttgctaatggattatatacatcaacttatttaagtcttgatgattcaggtgttagtttaatgagtaaaaaggatgaagatattgatgattacaatttaaaatggtttttatttcctattgataataatcaatatattattacaagctatggagctaataattgtaaagtttggaatgttaaaaatgataaaataaatgtttcaacttattcttcaacaaactctgtacaaaaatggcaaataaaagctaaagattcttcatatataatacaaagtgataatggaaaggtcttaacagcaggagtaggtgaatctcttggaatagtacgcctaactgatgaatttccagagaattctaaccaacaatggaatttaactcctgtacaaacaattcaactcccacaaaaacctaaaatagatgaaaaattaaaagatcatcctgaatattcagaaaccggaaatataaatcctaaaacaactcctcaattaatgggatggacattagtaccttgtattatggtaaatgattcaggaatagataaaaacactcaaattaaaactactccatattatatttttaaaaaatataaatactggaatctagcaaaaggaagtaatgtatctttacttccacatcaaaaaagatcatatgattatgaatggggtacagaaaaaaatcaaaaaacatctattattaatacagtaggattgcaaattaatatagattcaggaatgaaatttgaagtaccagaagtaggaggaggtacagaagacataaaaacacaattaactgaagaattaaaagttgaatatagcactgaaaccaaaataatgacgaaatatcaagaacactcagagatagataatccaactaatcaaccaatgaattctataggacttcttatttatacttctttagaattatatcgatataacggtacagaaattaagataatggacatagaaacttcagatcatgatacttacactcttacttcttatccaaatcataaagaagcattattacttctcacaaaccattcgtatgaagaagtagaagaaataacaaaaatacctaagcatacacttataaaattgaaaaaacattattttaaaaaataa

SEQ ID NO: 296 - DNA, 1164 bp, Bacillus thuringiensis
  source 1..1164: mol_type = genomic DNA
atgatagaaactaataagatatatgaaataagcaataaagctaatggattatatgcaactacttatttaagttttgataattcaggtgttagtttattaaataaaaatgaatctgatattaatgattataatttgaaatggtttttatttcctattgataataatcagtatattattacaagttatggagtaaataaaaataaggtttggactgctaatggtaataaaataaatgttacaacatattccgcagaaaattcagcacaacaatggcaaataagaaacagttcttctggatatataatagaaaataataatgggaaaattttaacggcaggaacaggccaatcattaggtttattatatttaactgatgaaatacctgaagattctaatcaacaatggaatttaacttcaatacaaacaatttcacttccttcacaaccaataattgatacaacattagtagattaccctaaatattcaacgaccggtagtataaattataatggtacagcacttcaattaatgggatggacactcataccatgtattatggtatacgataaaacgatagcttctacacacactcaaattacaacaaccccttattatattttgaaaaaatatcaacgttgggtacttgcaacaggaagtggtctatctgtacctgcacatgtcaaatcaactttcgaatacgaatggggaacagacacagatcaaaaaaccagtgtaataaatacattaggttttcaaattaatacagatacaaaattaaaagctactgtaccagaagtaggtggaggtacaacagatataagaacacaaatcactgaagaacttaaagtagaatatagtagtgaaaataaagaaatgcgaaaatataaacaaagctttgacgtagacaacttaaattatgatgaagcactaaatgctgtaggatttattgttgaaacttcattcgaattatatcgaatgaatggaaatgtccttataacaagtataaaaactacaaataaagacacctataatacagttacttatccaaatcataaagaagttttattacttcttacaaatcattcttatgaagaagtaacagcactaactggcatttccaaagaaagacttcaaaatcttaaaaacaattggaaaaaaagataa

SEQ ID NO: 297 - DNA, 3727 bp, Bacillus thuringiensis
  source 1..3727: mol_type = genomic DNA
atgaattcatatgaaaataaaaatgaatatgaaatattgaatgattcaaaaaaatctaacatgtcgaacccttatttacggtacccactagcaaatgattcactagcttctatgcaaaatacgaattataaagattggttaaccatgtgtgatagaactgatactgatgttttaagcagcagaggtgcagttagtacgggggtgggtatgctttctacgattttgagcctttttggcattccacttatcggagaaggaattgatttattactaggagcggcagatttcctttggccagaatccgatggcggccatcaatacacctgggaagacttgatgaaccatatagaagagcttatggatgaacgattagaaactgaaaaaagaactactgcacttgacgatttacgtggtctaaaagctcttttaggtctattccgtgacgccttcgattcttgggaaaaaaatcaaaacgacccgatagctaaaaatagggtcggcggctattttgaagatgtgcatacccattttgtgaaagatatggcgtctatattttcagctacaaattatgaagtattactattacctgtctatgcacaagctgcaaatttacatttacttttattaagagagggagttatttacggaagccgatgggggatagctccagcagctgatttctatcatgaccaactattgaagtatacggccatatacgcaaaccactgtgttacttggtataataatggtttagctcaacaaaaagaactgttcgcaaaatcaccaaactggaaccgcttcaatgcatatcgtagagatatgacaattactgtattagatatcattgcattattcccaacttacgacgctcgtttgtatacaaaaccaataaaaacagaacttacaagagaaatctattcagatgtattgaatttagatgtatatggggtacagcagacagatttgaataaaaatgaggccgccttcacacggtccccacatttagttacaagattacgaggttttgatttttacacaagaactaagtatgcatattggagatatttggctggccatacaaattatttttcttttacgggtaatggtactatttattcaagttcatttaataactggtatgatacagatatgaccaagagtacaataaacattccagactatgctaatatttataagttatggacaaaaagttatacgaatatatctccctatacggacccagttggtatctcacaaatgcaattctctctaacaaataatcagcagttaacttatacgggtacgagtgccccaaagtatcctgtacgcgaaacgttctttgaaataccacctacggatgagaagccgctaacttatgaaaattatagtcacattttatcttacatgactagtgctcaacattttggagataaaaaaataggatatacatttgcttggatgcatgaaagtgtagattttgacaatcgtgttgatccagataaaatcacacaaataccggcggtgaaaggggattatcttcaatatggatatgttaagcaaggccccggtcatacaggcggagatcttgtgtctatgattcgtactgatcgtttagggataaatgtttattttcctcaaccactagactatcgtatacgtattcgctattcaacaagtagtaatggttatctatatatttattcacctaatactaaaatagtatatctcccacccacaaccttagtagatggtcaacctacttttgacccgatggacttcagtgcattcagagttgtagaagttccagctagttttcgtgcaagtgttgcgggctatacaaactttactattgaagcagggtttggcccagtatatatagacaaaatcgaatttatcccagataatacaacaactttagaatatgagggaggaagggacctagaaaaaacaaagaacgcggtgaacgatctgtttaccaattaaaacaaatgattaactagagtaggtggtatcgctgttaaaaaaataagcggaaaaggttgtgaatcctatgtttatcagtaatataaaaaatacgctaaaaatagaaacgacagattatgaaatcgatcaagcggccatttctatagaatgtatgtctaatgaacattcttccaaagaagaaatgatgttatgggatgaagtaaaacaggcaaaacaacttagctggtctcgtaatttactctacaatggtgactttgaagatgtatcaaacggatggaaaacaagtaatacgattgagatccgagagaatagtcccgtttttaaaggacattaccttcatatgtttggggcaagagatattgatggaaccctatttccaacttatatctaccaaaaaatagaagaatctaaattaaaaccatatacacgttatcgagtaagaggatttgtgggtagtagtaaagatctaaaattaatggtaacacgttacgggaaagaaattgatgccatgatgaatgttccaaatgatttggcctatatgcagcctaccccttcatgtggagattctcgctgtgaatcatcgtcccggtatgtgagccaagggtatcctacaccagtaacagatggatatgcttctggtaggtatgcatgccagtccaatcgaggtacaaagcatgtgaagtgtcacgatcgtcatccatttgattttcatattgacaccggagaattagatacaaatacaaacgtaggtattgatgtcttatttaaaatttctaatccagatggatatgctacattagggaatctagaagtcattgaagaagggccactaacaggagaagcattaacgcatgtgaaacaaaaggaaaagaaatggaaacaacacatggagaaaaaacgttgggaaacacaacaagcctacgatccagcaaaacaggctgtagatgcattatttacaaacgaacaagagttacactatcatattactttagatcatattcaaaacgctgatcgactgatacaggcgattccctatgtgtaccatgcttggttaccggatgctccaggtatgaactatgatggatatcaagggttaaacgcacgtatcatgcaggcgtacaatttatatgatgcacgaaatgtcataacaaatggtgactttacacagggactaacgggatggcacgcagcagggaaggcaatggtacaacaaatggatggcgcttctgtattagttctatcaaactggagtgcgggggtatctcaaaacttgcatgtccaagagcatcatggatatatgttacgtgtgattgctaaaaaagaaggacctggaaaagggtatgtaacgatgatggattgtaatggcaatcgggaaacactgaagttcacttcttgtgaagaaggatatatgacaaagacagtagaggtattcccagaaagtgatcgtgtacggattgaaataggagaaaccgaaggtacgttttatgtagatagcatcgagttgctttgtatgcaaggatatgctagcaataataacccgcacacgggtaatatgtatgggcaaagttataatggaaattataatcaaaatacgagcgatgtgtatcaccaagggtatacaaacaactataaccaaaactctagtaatatgtataatcaaaattatactcacaatgatgacctgcattccggttgcacatgtaaccaagggcataactctggctgtacatgtagtcaaggatag

SEQ ID NO: 298 - DNA, 930 bp, Bacillus thuringiensis
  source 1..930: mol_type = genomic DNA
atgatttttttggcaattttagatttaaaatctttagtactcaatgcaataaattattggggtcctaaaaataataatggcatacagggtggtgattttggttaccctatatcagaagcacaaatagatacgtctattataacttctactcatcctcgtttaattccacatgatttaacaattcctcaaaatttagaaactatttttactacaactcaagtattaacaaataatacagatttacaacaaagtcaaactgtttcttttgctaaaaaaacaacgacaacaacttcaacttcaactacaaatggttggacagaaggtggggcgatttcagatacattagaagaaaaagtaagtgtatctattccttttattggagagggaggaggaaaaaacagtacaactatagaagctaattttgcacataactctagtactactacttttcaacaggcttcaactgatatagagtggaatatttcacaaccagtattggttcccccagccaaacaagttgtagcaacattagttattatgggaggtaattttactattcctatggatttgatgactactatagattctacagaacattatagtggttatccaatattaacatggatatcgagccccgataatagttataatggtccatttatgagttggtattttgcaaattggcccaatttaccatcggggtttggtcctttaaattcagataatacggtcacttatacaggttctgttgtaagtcaagtatcagctggtgtatatgccactgtacgatttgatcaatatgatatacacaatttagcgacaattgaaaaaacttggtatgcacgacatgcaactcttcataatggaaagaaaatatctataaataatgttactgaaatggcaccaacaagtccaataaaaacaaattaa

SEQ ID NO: 299 - DNA, 750 bp, Bacillus thuringiensis
  source 1..750: mol_type = genomic DNA
atggaaaatttaaatcattgtccattagaagatataaaggtaaatccatggaaaacccctcaatcaacagcaagggttattacattacgtgttgaggatccaaatgaaatcaataatcttctttctattaacgaaattgataatccgaattatatattgcaagcaattatgttagcaaatgcatttcaaaatgcattagttcccacttctacagattttggtgatgccctacgctttagtatggcaaaaggtttagaaatcgcaaacacaattacaccgatgggtgctgtagtgagttatgttgatcaaaatgtaactcaaacgaataaccaagtaagtgtaacgattaataaagtcttagaagtgttaaaaactgtattaggagttgcattaagtggatctgtaatagatcaattaactgcagcagttacaaatacgtttacaaatttaaatactcaaaaaaatgaagcatggattttctggggcaaggaaactgctaatcaaacaaattacacatacaatgtcctgtttgcaatccaaaatgcccaaactggtggcgttatgtattgtgtaccagttggttttgaaattaaagtatcagcagtaaaggaacaagttttatttttcacaattcaagattctgcgagctacaatgttaacatccaatctttgaaatttgcacaaccattagttagctcaagtcagtatccaattgcagatcttactagcgctattaatggaaccctctaa

SEQ ID NO: 300 - DNA, 792 bp, Bacillus thuringiensis
  source 1..792: mol_type = genomic DNA
atgcaccttaataatttgaataattttaataatttagaaaacaatggtgaatatcactgttcaggacctattattaaaaaaccgtttaggcatattgcattaacagttccatccagtgatataactaattttaatgaaattttttatgtagagccacaatacattgctcaagcaattcgtttaacaaatacatttcaaggagctatagatccacttaccttaaatttcaattttgaaaaagctttacaaattgcaaatggtcttcctaatgcaggagttacaggaactattaatcaaagtgtaattcatcaaacaattgaagtttcagttatgattagtcaaattaaagaaattattagaagtgtgctagggctcgttatcaatagtgctaatttttggaacagcgtagtatctgctattacaaatacatttacaaatttagaacctcaagtagatgaaaattggattgtttggcgtaatttatcagctactcaaacaagttatttttataaaattttattttctattcaaaatgaagatacaggtagatttatggcaatattgcctatagcatttgaaattactgtggatgttcaaaaacaacaattattattcattacaataaaagatagtgcacgatatgaagttaaaatgaaagctcttactgtagttcaagctttagattcttataatgcacccattatagatgtatttaatgttcgtaactatagcttacatcgtccaaatcataatattcttcaaaatctgaatgttaatccaataaaatcgtaa

SEQ ID NO: 301 - DNA, 7305 bp, Diabrotica virgifera
  source 1..7305: mol_type = genomic DNA
acaactgacacataacgtcagtagttgtctattttcactggtgactaatttttgagaattagtaattggtttcgtatttttttcttaacaaaagggcaaaatgagcttttttggaaaattgttcggggggaaaaaggaagagatagcccctagtcctggggaggctattcaaaaactcagagagactgaagaaatgttaataaaaaaacaggattttttagaaaagaagatagaagaatttaccatggtagcaaagaaaaatgcgtcgaaaaataaaagagttgcactccaagccctcaaaaagaagaaacgattggaaaagacccaactacaaatagatggaacccttacaactattgaaatgcagagggaagccctcgaaggagctagcacaaatactgctgtattagattctatgaaaaatgctgcagatgcccttaagaaagctcataagaatttgaatgtagatgatgttcacgatatcatggatgacatagccgaacaacacgacatagccaacgaaatcacaaacgctattagcaatcctgtcggattcaccgacgatctggatgacgatgaattagaaaaagaattagaagagctcgaacaagaaggattggaagaagacctgctccaagtgccaggtccaactcaactgccggctgtgcctgctgatgcagttgctactaaaccaatcaaaccagcagctaaaaaagttgaagatgatgacgatatgaaagaattggaagcctgggcctcgtaaaattcctgaaatctggatatttgtaaacgaaatcacccatctaagatgaaaacattataaatatataggtaataacagctaaaaacgtttcaatgtagaacaagcttttgctgaaaaggcgtcttgcaaaaaatgttgataatttagaattctctatatattatatatttgccctttaaggaaagatttcttttatagtcatagttcaaccaaacgtttcataaattagaatacaggggtgtcagaattctacgtgaatttattgaaaaaaaagaactttccttaaagttggcataatgatatttttgaaattatgtaaataggtatatgtatgctcttactaacggttttaatattgggtttagaagcaccttaattttatttttatacaaggtagtaacattttttcattgtaatttgttaaaaaatattgtataacgcaaaaaatggtgtgataaagcaaaatattattgagtgcttattttcttattttattaaaagatcttatttacgttaaatctaaatatattgggtatctcagaatatgttaacaaaggtttcttgtatcaacagaaaaatacaaacttattcattattgtggttcatttgattatgcttgtgtatatttaatctgccataaacaagttttgataaatgtcactgctctgtactttttgtttttctgactgtagtttctgtcgtttgtaattccttggtctcggccatcgcccatacacacatagggaatgttgtataaaagaaatgatagtagactagcaatggcccgaacagcaagaattaaataattaaaatatggaaagactgaatactaagctgagattggtcaaagcccttatttttcctattgctatatacgcagctgaaacatggactctcaaaaaaatcaatcgaagtaagatcgaagccttcgaaatgtaggtctacagaattattgtacccgtgtcctggagagaacacagaaccaacctgtcaattctgaaagagcttcatataaaagacaaggtattaaaaaaagtataccgaccatacttaaattactttggtaaagtaacgattactatacgaagaggcaaatcgttactttgattactctgattacttcgtaccaatcgtatcagagcgagtaacgactattgtatctactttgattacttcgtatcagagcgaataacgactattgtatctactttgattactctgattacttcgtaccaatcgtatcagagcgagtaacaactattgtatctactttgattattctgattacttcgtaccaatcgtatcagagcgagtaacaactattgtcagggccgcgtttaggtcaaatgacgccctaggcaattctctagtagccgcccttcaaacatgtaccatttttgcgaaaaaaaatgcaagcagaattttttatttaaataagaatgttattgcacaaatctcggtgttcttcaaataatgtttagaaatgtgttaaaaatattctttattttacatcaggcgtaatgttacatattactattataagtatgtttgagcgtttggaactgtgtccaatgcatgcgttttaatgcatgatacgtagaaattgcctgtttgtagccgcacctacttgttcgattttaaatgagagatgcattgaaaacattactcaagcactatgtgtttatagctttgtttaacaataaaaaaattaatttttagcaatgcaaataatcaaaaccggtataatttgacatgcactttcaaatgcggtaagcagaattgctattttattttttaatcaaaagttattcggattcaaaaattgcaatttttcgatattttgaaagttcaaccgcgtctatctcgaaaactatgcatcctacgaaaaaactttaacaacattttttgcttagaatgacccaaaaaaaatagaaaaaaggtttgttttgctaagaatcactgttatgtaattcctcaagttctttgtttataataaccttatccggaaaaaattagactgttttaataaatatctagacaaattgcatatttgtaatgtacacaaaagtacatacaaattaaaagttctaaaaaaataaattttgtaattttatgtcaactatcttaattgagtgcaaaaaatgcaagaaatcgcgttgattgcactaaattgttaataattaaaaacagacgcgaactctaggcaggaaacaagtaggttttcatcctataggtcaacagtcaacaataactaaaaacgtagtcatctacctcaatatttcagtggcccgaacatggtctattttttgcttatttccctggagtaggtatatcagtgtgacgacactaaccttatctacttgtaataatacagtttgaaaatcccaaccctaactcgatgtcctactgtcgacaagtcaaatctttagtttttgcaaaatgtgcaatattgaagtgttcaatggcccaccgcatttgcccagctgccggcggcctaataatcactaaatttatgacttccatcctttttaaatgaatagtgttaagataacagaatgctatgtttgatttatttttgttatgaatgcagtttgttttattctatttagaaatgaatgccaacttctatttcattgatggatgaacatacagacttgttattcgattttaatttttatatacaaatatttttttgtacagtatttttgccgccctctcacaatttgccgccctaggcaactgcctatattgcctaatggatacagcagccctgactattgtatctacaacctgtacacttaaatactttctaccaatcgtatcccagcgagtaacggacgagacacgtattttacgagtgttatcgaatatcgttatcggtttgaaacgttttaagggtgtgagggtgaggagaagatagaagatgaaacagagggagatataatgtataggtaaaatatttaatgtatgtcgctaacaaagatcgaatgcgagaaccctatatttttatctcgatctatatctatacctatacaaaatacctacctactgagaaatacgattctcgatatgattaccggtactcaaatacaaaagtcatcatagtaatcaaagtaacgaatactgtaaatgattactttatacaaaagtaacgatttgtaacgaatactcgacagtaactataatcaacatcactaatagtcggaagaacgtggactatataattattaatattagaaggaaatgccgaagaccaagaagaagatctcgaacacgatggacagaccaaattaagactctggtgggaaaatcacaatatgaaagcgtccatctggcacaggatcgcagccattggatacagcaagctaacaatatttagagtatcaccacgccccgacaaaggctcaaggaatgaggaggagagggttttcatattgaaactaattgtaaaggtgcgtcaagatatgctccgaatgccgtatcgaacctcctcgcgaacttaaatgtggacggcaccctgcaacaacgtactgaacctcgtcgcgatcagggtgcaacatcgaactgttccactagtttccggtaaatccatccacatcaaagtaaagggtcgtcgaaaggttcagaacgaggtttgccgtaaattcacatgtggactagtttgcgaagcattcggcgtttcggtcattgttattttgaaattgagtgcatcaacatggaatgaatggatgagaattgtactactaatagaaaattatcgagaaaacgaaatattatgggaaccaaagagtcccagatattataacaaaataaaaaaataatgcataagtatataagctgatgcagcaacgtccatcttgcagtaaaggtgttaaggcaattactgatggaacatcaaaatgttcggttcgttgcttatttcaagaccccttgcgacaacgtcgcgaacctctgttgatcgcttcgatgttcgcgacgaggttcgatacggcatggcattcggagcatgtgtggacgcacccttagtacaacgagttttatttctgtagaagttttttgacagtttacaaacggtgcgctctatgcttgtatgaaaattaacttttttcttatggttgtatggttatcaaatactattgactgtaaaacatccaactcccacaaaaatctggaagcacgttgccactagcgccactgtcggcttgagttgaactacgttttgacaacgtaaaatttgacgtaaacattcaaatttaattttataaatttttgaataacgagctaattttgctaaattaaattaaaataaaaatagttcaaacacttatacaaaaacaattataaagccattttataaatgtaaggttagattgctctggttatcctactcataccgctagatggcgctatttttttgcttcctcaaagttaatgggaaatgtcaagagttgtgtgtattacagtctatagtatttggtgatagtacggactatgtcataattataatttatgaggccaatcctcgccaatgaagaagtacttcgctgaatgaccggcaaaaggcgttaaaattctgtaaaatgtacaactgacaattatagttcagcgcaaatttaagtacatgcagcatagctgcatgctgcatgattcgcgaggttagtgtgtagagatccagacagcagctgtagattaaaagaaattattatcatgatgcgataggatgcgatggaaaagcttatgggtaaactatgagttaacaaaaatcctcaaatcgatacaagggtttgcaaaagatagttgtaatacgatctaagcaaatcgtacaatagggatgtagtatagtattaatacagtacgaaagtatttattttatattcggtttaaaatttactaaaaataaaataaaatgtcgcgttttagggttttctattatagaaactaccgtttctcaaatatcaataaattttattcaacggtcttccaatgactccatcccgttttctttggtgttcgtctgaaagtgttgcaaatgtctctgttatagccgcaatggcttcttgtttggacgacaagcactgataagaaaaactgacttaaattttaaaaaacagatgaaattctaagagaatcaaacctggaatttagatgggtcttccattacttcatagtgtagatcctcctaatccaagatattttgtggacagtttcattgtcctggcagaaaaggattagtgatcatctcatgatcttgaccttgtagaaaactctatattgttgaattccgatgaaagatgtgcgatatctgagcgattccaagagcttatcagactaccttagtaaatcatgtacagtaagcgccaccctactagatacatgggtaggtacctaattgctatgtttatgtgctagtccggtccgttctcaaatgtgactttcatccctgtcatgttactgtcaagaaactattcaaaataattgtttttccgtacaaaaaatacattaattaatagtattagtactctgctttaaaataactttattcaaacaccaagaatattacaatactttaaaacttttacaaaacaaaatgacaactataaacgtcaaaattagatcagctgatctattatttgtcaacttcatatgttaatattgtccttttcatgatcatttttcagtgcgtaacaaatgataggagaaagggtaagtccgtgataatacacatttatgacatttattctaacatgacattttagttaaatctgacagttgtcacattttattttcaatttggaataaaaacaaagcaaatgtgtttcttgcatttataaaatggtattttctttgatttgtatagtgtatagtcttataaattatacagattatatttgtaatattattatctaattaaaaaaaattatttttttattatggcgccatctatcgacaactaaaataactagaagaaatgttataaaaatgtcaccgacgaaatgtaatcaccgacgtgcttttttttctgtctcatacaagttaatgtgttagaaagaaatcgaaaaactgtgacgcactgaaagatgatcatgagaaataatttattcagtttctatacattttctgacgttctaaacgtcactagacataaataaacaagtgaagggtccaggactgtaatagctctatgttcctatgtatctagtagggtggcgcgcactgtataattggattattattcaatttgtctactgtaacgtctcggttcttaatacaactcctggctttttttatttattttttgtatttttttttcagggaaccttttttatctagttatttttttataataatagtaaaccatgatttttatttttttcccaattgagtgcatagataaaagcgcgtttgcatatatgggacacccagtattaaaaaatatgcattacatttttctttacttggaccttgtgtacctgtaacctacattcaccaaattgtgttttgtattctaattttaaatacagtaatatattttgattcactta

SEQ ID NO: 302 - DNA, 1093 bp, Leptinotarsa decemlineata
  source 1..1093: mol_type = genomic DNA
cattattgggttggcgacactgtgaatgactaatagtagttggtctatcagccataatttgttgcttgtttagtgcaaatatgagttttttcggtaaattattcggtggcaagaaagaagatgaaggggcctcgcctgcagaggcaatacaaaaacttagagatactgaggaaatgctcattaaaaagcaagactttctggaaaagaagattgaagaatatactctaatagcaaagaaaaatgcatcaaaaaacaaaagagtggccctgcaagccctcaagaaaaagaagcgattagaaaaaaatcagttgcaaatagatggcactttaactactattgaacttcaacgagaagctctggagggagctagtacgaacaccacagtattggaatctatgaaaaatgcagctgaagctcttaagaaagcccataaaaacttggacgtggacaatgtgcatgacatcatggatgacattgctgagcaacatgatattgcgaacgaaatctctaatgccatcagcaacccagttggattctcagatgacttggacgatgctgagttggagaaagaactagaagaacttgaacaagaaggtctggaggaagatttactcaaggttcctggaccgacggaattgccagctgtcccaactggcgccattgccaagccagtcaaaccagctaaaaaagtggaggaagatgacgatatgaaagaactcgaagcttgggcctcataaaatgttcatggttgctaggtttgttgaaattttataaaaatatgtaggcacccatctaacccaagagattcaaagttattaatatatcactgaagtggagttgaatatcttgtttattggtggtgtaaataagaacccaactcttgatttctcctccgaaggcttgggatgcttctccataatgtatatatatcttttattttgtttacaaaggacaactagcagggtcctcaaaagattaaaactccatttgttaggaattatatatttttagcataattgcagtaatttcagagttgcctagatgcaagcttttggtaattcaaatttttctttaataataaagtatatttaca

SEQ ID NO: 303 - DNA, 488 bp, Leptinotarsa decemlineata
  source 1..488: mol_type = genomic DNA
atggtcggtatgggacaaaaggactcatacgtaggagatgaagcccaaagcaaaagaggtatcctcaccctgaaataccccatcgaacacggtatcatcaccaactgggatgacatggaaaagatctggcaccacaccttctacaacgaactccgtgtcgctccagaagaacacccagtccttctcactgaagctccactcaaccccaaagccaacagggagaagatgacccaaatcatgtttgagaccttcaacacacccgccatgtatgtagccatccaagctgtactctccttgtacgcttctggtcgtaccaccggtatcgtcttggactctggagatggtgtcacccacaccgtaccaatctacgaaggttacgctcttccccacgccatcctccgtttggacttggctggacgtgacttgaccgactacctcatgaaaatcctcaccgagaggggttactcattcaccaccacagctgaaag

SEQ ID NO: 304 - DNA, 2472 bp, Leptinotarsa decemlineata
  source 1..2472: mol_type = genomic DNA
gtcagctgactgtcttgtgacaaatttacttgcttggttaaaagttgatagtccgtcgtcttgcgagttgtgaattgactgggtgaggttgaaagtgatacaagtctacattcataatgtcgagattaattgctgatgaggaacaggaatcacagtatggatatgtccatgctgtatctggaccagtcgttacggccgagaaaatgtcaggatcagctatgtacgaattggttcgagtaggatactatgagttagtaggcgaaattatccgtctggaaggtgatatggccaccattcaggtatatgaagaaacttctggagtaacggtgggagatcctgtgttgcgtaccggtaaacctctatctgtggaacttgggccaggtattatgggttccatctttgatggtatccaacgtccgctgaaagacatctgcgacatgacggaaagtatctacattcccaagggtgtgaatgtgccttcactctccagaactatcaaatgggaattcaacccaatcaacatcaagttgggatcccacttgacaggtggagatatttatggtatggtccacgaaaacacccttgttaagcacaaaatgatcctcccaccaaaatctaagggaacagttacatacgtggcagaaccaggaaactatactgttgatgaagttgtattggaaactgagtttgatggagaaaggtctaaatacactatgttacaagtctggccagttcgacaggcaagacctgttagtgaaaaactcccagctaatcacccgcttctcacaggacagcgtgtattggactctcttttcccatgtgtgcaaggaggaaccactgctattcccggtgctttcggttgtggtaaaactgtaatttcccagtcactttccaagtattccaactctgatgtcattgtgtatgtaggttgtggagagagaggtaatgagatgtctgaagtattgagagatttccctgaactgactgtggaaattggtggtgagaccgaatctatcatgaaacgtaccgccttggttgcaaacacctccaacatgcctgtcgctgcccgtgaggcttctatttatactggtattaccctgtctgaatatttccgtgatatgggttacaacgtttccatgatggctgactctacatcacgttgggctgaagctttgagagaaatttcaggacgtttggctgaaatgcctgctgattctggttacccagcctacttgggtgctcgtcttgcctctttctatgaacgtgctggtcgcgtcaaatgtttgggtaaccctgacagagaaggatcggtttctatcgtaggagcagtatctccacccggtggtgacttctcagatcccgttacttcagcaactttaggtatcgtacaagtgttctggggtttggataaaaaacttgcccagcgtaaacatttcccatctattaactggctcatttcttattcgaaatacatgagggctctggacgatttttatgacaagaacttcccagaattcgtatcactcagaaccaaagtcaaggaaattctccaggaagaagaggacctctcagaaattgtgcaactggttggtaaagcctctttagccgaagcagacaaaatcacccttgaaatcgccaaactgttgaaagaagacttcctccaacaaaactcctactcctcctacgacagattctgcccgttctacaaaacggtaggcatgctcaagaacatgatcggactgtacgacatgtcgagacacgctgtagaaacgaccgcccaatctgaaaacaaaataacctggaacgtaatcagagactccatgagcaacatcctctatcagctcagcagtatgaagttcaaggaccccgtcaaagacggagaagccaaaattaaagcagacttcgaccagctctatgaagacatccaacaggccttcagaaacttggaggattaagtgggggtcgcgtaggactgtgcagcttggggttttaggtttcgaagatgtttctctggaactgcacttggtcactatcagaaggcctctgtccctcactctgggtattgtcaaccagcggaagtagtaataatggggttttcccttttgatattatcatgtataataataaatcatgtaaatttttcgagtatgtgtatagtttttgagatttcttggtgagggtaagtgttgaaaactataatttttcccatcattccagttacttttaagtttgattttttttttcattgaaataggtgcttatcagttgtccagtattatcgatttcattgaactgtggccattttcgaaatcatttacacattttaaagctgttgtacattatatttacctttttaaagatatatcttactattgtacagtttaccatgtatccaatgtctagaggtttagaacttttgattgtagtgctattgttctgttttgaacgataataaacatacatactgttgtt

SEQ ID NO: 305 - DNA, 1686 bp, Plutella xylostella
  source 1..1686: mol_type = genomic DNA
atggcagcagtagcagcagcccagaagaaccgcgagatgttcgccatcaagaagtcctacagcatcgagaacgggtacccgtctcgtcgccgttcgctggtggacgacgctcgcttcgagaccctggtagtcaagcagaccaagcaaagcgttttggaggaggcccgtgcccgcgccaatgactctggcttggattccgaacttatccaagacgatgtcctgattggcaccggcgctgtcactccaactgttgaggtgggcactcagcaggacgacactaaagatggtcaactcgccgatgcggaggtcggtggaatagacggaaatgcagatgacgattacaccttgaccgaggaggaggtgatcttgcagaactccgccagcgagtccccggaggccgagcaggcgctgcaacaagcggctttgcttctgcgcctgcgcgacggcatgggctcgctcgcgcgcatcctcaagaccatcgacaactacaagggctgcgttcaacacctcgagacccgcccctccaacgccaacgacatccagttcgatgctctcatcaaagtgagcatgtctcgcggcaacctgctccaactcatccgatctctccgccagtccaccgccttcgccggcgtcgacctcatctccgacaacgtctccagcaagaccccgtggttccctcgccacgcttccgacctcgacaactgcaaccacctgatgaccaagtacgagcccgagctcgacatgaaccaccccggcttcgcggacaaggagtaccgcgcgcgcaggaagaccatcgccgagatcgccttcggctacaagtacggcgacccgatcccgcatatcgtgtacacggagaccgagaacaacacgtggtcgcgcgtgttcaacacggtgctggacctgatgcccaagcacgcgtgccgcgagtacaaggcggcgttcagcaagctgcagggggacgacatcttcgtgcctcaccgcatcccgcagctggaggaagtgagcaacttcctgcgcaagcacacgggcttcacgctgcgcccggccgccggcctgctcacggcgcgcgacttcctcgcctcgctcgccttccgcgtgttccagtccacgcagtacgtgcgccacaacaactcgcccttccacacccccgagcctgactgcatccacgaactcctcggccacatccctctgttggccgacgccagcttcgcccagttctctcaggagatcggtctcgcttctttgggagcctctgacgctgaaatcgaaaaactgtctaccgtgtactggtttacggtggagtttggtctctgcaaggagaaccagcaactgaaggcttacggcgccgctctcctgtcttccatcggggagctccttcacgcgctgagtgacaagcccgagctgaggtccttcgagcccgcgtccacctccgtgcagccctaccaggaccaggagtaccagcccatttactacgtcgctgagagcttcgaagatgccaaagacaaattcagacgctgggtgtcaaccatgtctcggccgttcgaggtgcgcttcaacccgcacacagagcgtgtggaagtgctggactccgtggagcagctcgagaccctcatctcccagctcaacaccgagatgctccacctcaccaacgccgtcaagaagctcaagggctcccacttcgagtga

SEQ ID NO: 306 - DNA, 1044 bp, Diuraphis noxia
  source 1..1044: mol_type = genomic DNA
cagaagattgttcaaacacatatatcgtcgtttcgttctggataccgattattcacaacatgggaagttacaaattatacctggccgtcatagcaatagcttgcatagctgcagtacaggaagctagttgctctgatgagcaggtacagtacgatgatgrggaagaagtgatcggattagagaaagagcaggaagaagtgtccgaaccagatatggaggaaaaagaagagccagaatcagagatggagtaccatcagtgcgaggaatacaaatcgaagatttgggacaatgcatttagtaataaggatgctatggacatgatgaaactgacgtttataacagctgagaaaatgggctccgacgccgtgtgcactgacacagcccgggccttcataaacttcatcgaagtgatggccaccaacagtaactcccaatacacgagaagtatgttcaaaaagttggtggcgtttattgttagagagttgaacacgacgtcggacaatttcagagagacgtcggaggtgttcgaacgtatctggacaactccagagattcgtgactttatcagggactcagtcactcggaccaataacgtgctcaaggagccccgtatgagaagccgactgttcaaagtgattgaagcagctatggatctgatgtcgaaatccaaagacggagaatcaatgaaacagaagtttaaggggatgtacagagctcccaccaagatggcaaggagtgccatggataaggttggaaatttctttcgaaaactttaataagaatgtccatacagactagtgatatatatatatatatatatatatatagcatatacatatagataaacataaagtgcagattttctaaaaaaaaatgttaacctaaaatctcacttccccgcctctctgagagtcgtcttcagtgttttgtacagtatcattacacattcggtatatctaacataccacacaccgcgttgttcttgcaataaatattgttattgttattattttattttgttctaaataaactcaattgattaac

SEQ ID NO: 307 - DNA, 3085 bp, Acyrthosiphon pisum
  source 1..3085: mol_type = genomic DNA
tgaacctgcaataatcgccgccaccgacgcgacgtacagaccggtccgtgcagtgtcccttagttgtacttgtgcgctttttgtgtgtcggtcacgtgcggatttcgcacaaacgttttgattttttcacatcgtatatctgttattgtctccacgcaataattattgcactcgccgcagtgttgcatccattcagtagaaacaatattggcacctattttatagaggctcgcgccgttcgtatttatagttattataaatatagtgcccgaacgacttcgggctcgtccgactttcgtggattttatatcattaatttttttatcgtcgtcgaaatgctgttaatcttgaatagtgatccgttgtcgtatccgtcaccgatccatgtgtcgacgatttaaatctagaagaaattcgtccaccacggtgtccaagacctcacactcactatttaccagccggctcgacctacaaatgacttattgttgatcgatcatcagagaaaactcgcacgcttaaacaaaaaatgtttttggaaaacgaacaccagccaattattagccattcaccgtacgacctagcacgtccacttgaacaccatcaccatcatcacctcaaccatcacgccgcgtccaatcatcttcagtcgagcaccgaccacttgcaagaagattcggaaggccggagtacggctagctcgccgacgtccagttaccgcgacctgtccgggtgcgaagactttgatctgaaaatcccgaaaccgtctggtcacgggtctggcactggtggaaataacaacaacaataaccacaataacaacaacaacaaggaacaaaaaccgaaaaagcacaagtgcaaacactgtgggctggagtgcacagaaaaggtgcagtactggaagcacattcgcactcacataaaacctgaacagttgctggagtgcccaaactgtgagttcgccaccgacctgaaacaccactacgaataccacctgctgaaccacacgggtgccaagccgttcacgtgcccggactgcgactacaagtgcgtgagcaagtcgatgctccaatcacacctcaagtcgcattcgaacgtgttccagttccagtgttacgactgtggttacgcatctaagtacatgcacagcctcaagcagcacctgaagaagcgcgaccaccggccggccacgccgctcaacccagacggcacgccgaacccggacatcgtcatcgacgtggtgggcaaccgacgcgggccgcggcagaacaagaaacaaaaccggcacaacccgtatcagcaacagcaccagcagcaacagctccagcagtctatgacggtgtgttcgtcgcaggacgacggcggcagcagtagcggcggccacccatcaccgtactcgatgcaacagctgttgcagatgcctgcttccggatgcgcccaagttacgtatccgacctcggccgagtcgtttatgtattcgatgatcactaaacgctccatggagatggttgattaccaggccgccgaatacatggccatcaagaacaacaacaataataacaactcctcgtcggtcgatgataagatggaagtgcaacagcaccaccaacaatcactacaacaccaccacaacaatcatcaccataaacgcggccatcagtaccattcagatgacgtgctgaaagtggaattggctgggcgtagcggtagtggcggtgaactgacgcccgaaccacatgtacctgtgttggcggtcgccgatccttcgcccccgaccgtcgttttggccatcgagacgggaccgttgaacttaagcagagactcagtggctcctcgcgccgcgggcagcagccggcgtaaggggatcgcgtgcaaactcgagcgaccggcaaccgaatcgcagcctaagtcggtgtcggtgccggtggtggttgttccggtgtcgcctgcagtaccgatggattgcagtagcgagtcaagaggaatggtggaggagactttgattccggtaaaggaagaatatcaacagtaccaccactaccatcagcagcagcagcagcagcagcagacgtcgtcattgtcttcgacgcctgaaaaagaagacaaggaagacgagacgcatgtgtgccaccactgtgacataatattcaaggagaacatcatgtactcgatgcacatgggtttccacagcttcagggacccgttcgcgtgcaacctgtgtggcgagataacggcagataagttttcgtttttcgctcacatagcgcgcgtgccgcacagttaggctgcaattagaagacgcacctacgaaagatacgaaataataatagagtacaaattttaaaacaattaaccctttaggtatgtaatataggatttatcgtaagaaaaaattaaaacagattaagaatataaagtaatgttacataggtactatattatacatctctttctttttaataactgtcccccccaaacctaagagtgtagttacgccgcacccatgcttcgtacaaatgaaaatcgtttttggcgcttagctaaaaacgattttaatttgtatacctacgcggccggtgttgttgaacggttccggttcttaaacgttgatttcaacttatcaacgtgtaagagtcggcaccgtgtcttcaaatcgtgattgcgcacattaatcgtcgagatgcttagttgtttatcgttttaaatatttttttctcgttatatttttctcggaaataaaattttaattatgttttaattttattttcgaggaataaaagccatcgccaattttagcgatttaaaaatgtttaactcgtgtcctcatagttaagcacaaattattagtttatttgttacatgtaaattttattatccttaaaaataacttttttaactttccaattacccaagattgaatcaataatgacaaatattgattttttttacgtttaaataccgtaatacctcatcttcttcattattttttattgtttgatctagtcgttaaactatttctcctcgtatactatagtttagtatcgtgtatacctatgcacttatgatagatactattaaaaataaaaaa

SEQ ID NO: 308 - DNA, 2383 bp, Botrytis cinerea
  source 1..2383: mol_type = genomic DNA
atgtcctataatcgattagatccggcgggccaaggccaagacgattattacaatatgaataatagacatcaatcgccgcaccctcaagggtaccaactagaagatgcgccatatggcagaccaaatactacttcacccggtcctggaatgcacaatctagagatacctatgggtcctggggcacatagaattggaacgccgagtgatcaattgcaagctcaaccatcttattcggtcgaacatttagatcaaaatcaataccatcagcgcatgtccctcaatcccagtcaaagctacgactcggaatattctttagatcctaacgcgcatcacgatgcttactaccaacctccataccaaccctctcctcatgaagaacaccctctacagaactatgccccagggcaagacccctacgcttacaatgatgatgatgaccatcaaccaattctacaatcgcatgaaccttatgggccagatccgcactcagctagtggcactgattacaaaggtggttatgacgggacggtacaatctccatcagcgacacctgtacctgcgttgagaagatacaagacggtcaaggaagtccaactgttcaatggaaatctcgtactcgattgtccgattcctcccaagcttttaaatcaagtcaatcatgcaccaccgccggagagagatgagttcacacatatgagatattcagccgcaacatgcgaccccagtgagttttttgaggagcgctttacattgcgacaaaaactctttgcaaagcctcgacacacagaactcttcatcgttgtcacaatgtataatgaagatgatgtattgtttgctagaacaatgcacggagtattcaagaacattgaatttatgtgcactcgtaaagacagtaaaacatggggcaaggatgcttggaagaagatcgtagtgtgtgtggtcagtgatggacgtgctaaaatcaatccaagaacaagggctgttttggctggtttgggggtttatcaggacggaattgcgaagcaacaagtcaatggcaaggacgtgacagcacatatctatgaatatacgactcaagtcggaatttctttgaaaaaggatattgttacactcacaccaaaacagcaacccgttcaattgcttttctgtttgaaggaaaagaatcagaaaaagatcaactctcacagatggttcttccaagcctttggtagagtacttgatcccaacatttgtgtactcctcgatgctggtacaaaaccaggaaaggactcaatttatcatctatggaaagctttcgatttggaaccacattgtgcaggagcttgtggtgagatcaaagctatgttgggcccaggaggaaagaatttggtcaatccattggttgctacccagaatttcgagtacaagatgagtaatattctggacaaacctcttgaatcggcatttgggttcatttcggtgttgccaggtgctttttctgcatatcgatatgtcgctttacaaaacgataaaactggaaatggaccactggagaagtactttgcaggagagaaaatgcatggagcaaacgcgggtatttttactgccaacatgtaccttgccgaagatcgtattttgtgtttcgaactggtatcaaagagaaattgtcactggatcttacaatacgtcaagtctgctactggagaaaccgatgtaccagatacaatggcggaacttattttgcaacgtcgaagatggcttaacggaagtttcttcgctgctatctatgctcttgctcatttctatcaaattttccgaagtgatcacagctttttacgaaaaatcatgtttttgattgaattcacatatcaaactattaacatgatcttcgcttggttcgctcttggtaatttcttcttggtttttcacatcttgactacatctctcggaagttctgacttactgggtaacgttggtgtaattcttggtgttgttttcgaatggctttacttgtttacgcttttgacctgttttattctggcgctgggaaatcgacctcaaggaacgaacaaagtttatatgtctatggtttatttctggatcattatcatgatatacctaatgtttgcttcgattttcatcacagttaaatcaatccaaactcaacttgctaaagacgaattcaactggacggatattatcaagaatcagatcttctatactctgatcatttctctcgcctcaacttatctactctggttcatttcttcctttttattcttcgacccatggcacatgtttacatctttccttcaataccttcttctcactccacatatatcaatattctcaacgtttacgcttttctgtaacactcacgatattacatggggcacgaagggaa

SEQ ID NO: 309 - DNA, 2736 bp, Botrytis cinerea
  source 1..2736: mol_type = genomic DNA
atggcgtactctggaaacggaggctatgatgagcataagctccaagaccttccacctggagggggcaactaccatcaccctcaagatgaagaggaaggagctttacctttactcgattctggaggacatggcggcccattcaacagcccttacgactctcactcccaaggaggccttcgagcgaatactcctccagtcagacctgtttctgcctacagtcttacagaaacgtatgcgaacgatccacaaccatacagcagcgattacaactcatcccacacatacaatgagcagttagaagataacccatacccacaaaccgacactcctttgtcaagagccgggactacctccacagaggcatggagacaacgacaagcccctcaggctggaggtctcaaacgttatgctacaagaaaggttaagcttgtccagggaagcgtcttgagtgtcgatcatccagtacccagtgctatcaaaaatgcaattcagcaaaaatacagaaatgatttggagggtggcagcgaggaattcacacatatgcgttacaccgctgcaacttgcgatcccgatgaatttactctgaaaaatggttacaatctacgacctgccatgtacaatcgtcatactgagttgctcattgccgttacctattacaacgaagacaagcagttgactgcacgtactcttcacggtgtcatgcaaaacatccgtgatattgtcaacctcaagaaatctgatttctggaatgtcggcggaccagcatggcaaaaaattgttgtctgccttgtttttgatggtatcgatccttgcgacaaagacacactcgatgttcttgctacaattggtatctaccaagatggtgtcatgaagaaagatgttgatggaaaggagactgttgctcacgttttcgagtacacaacacaactttcggttactgccagtcaacaacttatccgcccaaccgagggtgatgccaactgtcttcctccggtgcaaatgatgttttgcttgaaggcaaagaacacaaagaagattaattcccatagatggctgttcaatgcatttggtcgtctccttaaccccgaagtttgcatccttttggatgccggtacgaagccaggacctaaatcgttgttgtctttgtgggaaggtttctacaacgacaaagatctaggaggtgcttgtggagagattcacgctatgttaggaaagggaggcaaaaagcttctgaacccgcttgttgcaggtcaaaacttcgagtataagatcagtaacattcttgacaagcctctagagagttctttcggatatgtcagtgtgttgccgggagctttctctgcataccgattccgagctattatgggacggcctcttgaacaatacttccacggagatcacactttgtccaagattcttggaaagaagggtatcgagggaatgaacattttcaagaagaacatgttcttggccgaggacagaattctctgtttcgagcttgtagccaaggctggtagcaagtggcatttgacttatatcaaggcagctaaaggagaaactgatgtacctgaaggagctgctgaattcattggtcaacgtagaagatggcttaacggttcctttgcagcaggaatgtattccatcatgcatttcggcagaatgtacaagagtggtcacaatattgtccgcatgttcttcttgcacattcaattcttatacaacgtcttctccaactttctcagttggttcatgttatcttctttctggctcactactactgttattatggatcttgtcggtacccctactgctgcttcggacactactgcccttcaccatggctggcctttcggtgatactgctacccccatcatcaacacgattctgaaatatctctacttgggattcctactcgttcaattcattctggctcttggtaatcggcctaagggatccaaggctacttatattgtctcctttgtcgtttttggtgttatcaatctctacgtccttgttctatccatgtatctggtcgttcgtgctttctcgtcaggagatagtctcgatactagtagtgcgaaagatttctttgagagtttcttcggagatagttcgagttccggagctggtatcattattcttgctttagctgctacatttggattgtacttcgttgcatccttcatgtatatggatccatggcacatgttccattctttcggaccgtacttgttgctcatgtcatcttacatcaacattctcatggtgtacgctttcagtaattggcacgatgtttcttggggtaccaagggatctgataaagcagaagctcttccgtcagctaaaactacgaaggttgatggtaaagcagcagtcattgaagaaatcgacagaccgcaagaggatattgatagtcagtttgaggcaactgtcaagcgtgctcttagtccatttgttcctgaagttgaagatgagagtaagaccttggaagattcttacaaatctttcagaaccaagcttttgatctcttgggtattctcaaacgcgttgttggctgttgctatcactagtgacagtgttgatggatttggtttcggaaatactgcatcaataagaactgctaagtttttcgaaattttgctttactcaacggctttcttggcacttattcgattcctcggatgttcttacttcttgttcaagtctggtatcatgtgctgcttcatgagacgttaa

SEQ ID NO: 310 - DNA, 2715 bp, Botrytis cinerea
  source 1..2715: mol_type = genomic DNA
atggaaacatcaaggagctggaatagttcggctgaaaactatcctatgaatgaacttattcaacattcaaacaattctgttactgatcctgctacacagttagataacactgatcatattagtgatgtacatcactcaaatgatgctcatgatgttggtgaaagtttgctatcagatactagtggctaccatccaacaacaccctatgtgactggtactgggcaggtacaacgtcaacgttcaccaaccagctcagtgaacggtgaggaatttttcggggatcaacaccatcttccagatatcgaccaggacttctacagaagccccgaagactcctttaatgcgcaagacatgccgtccgcgaacggtgctcgtggagctcttcggcgccgcgctactcgaaagattaaactgattcaaggcggtcagggatctgtcttgagcgcaaactaccctgtaccaagtgcaatcaagaatgcattacagccccagtacagagatatagagaatggtaccagcgagttctcagagatgcgatacaccgcggtaacttgcgacccgaatgattttaccttgatgaacggttatacactacgccagcacatatacaaccggcacaccgagcttttgattgcaatcacctactataatgaggacaaggtgctattcgctagaaccttgcatggtgtgatgaagaacattcgcgatattgtgaatctgaagaagtccaggttttggacgcagggttccgcagcatgggagaaaattgtcgtctgcctagtgttcgacggtttcgaaaaggcggatccaggtgtgctcgatctcctcacaaccgttggagtatatcaagacggcgtgcgaaaacaggatgtggatggaaaggagacgacagcccatgtcttcgagttcacgacacagttatccatcactcccgacctacagctttctcgtcccaattcggatgtggatgattccagtaacttgcctccagtacagctcctcttctgtctcaaacaaaagaataccaaaaaaatcaactcgcatcgttggttgttcaatgcctttggacggattctcaacccggaagtcaccattttgatcgacgcgggaacaaaacctggacctcgctctttattggccttatgggaggcattctataacgacaagaaccttggtggcgcatgtggtgagatccacgctatgcttgggagccggaactccaagttactaaatccgcttgtggcaatacagaatttcgaatacaagatttcgaatgttcttgacaaaccccttgagagctccttcggctacgtcactgttctccccggcgcattttcagcatatcgctttcgagcgatcatgggccgtcccttggagcaatattctcacggcgaccatacgttgttgtctggcaagaaaagtatcaacaacatgaatatttttaaggagaatatgttccttgcagaagatcgtatcctttgtttcgagctagtagtgaaagaaggacagaattggcacttgtcttatgtcaaagctgccaagggcgagacagacgtaccggaaggccctgctgagtttctcagccaacgccgccgttggctgaatggatcatttgcggcctcgctatactcgcttattcacttcggtcgcatgtacaaatccgggcacagtctgctccggatgataatgtttcatttccagctgctatacaacattgccaatgttatttttagttggttctctttatcatcctattggctcactaccactgtcatcatggatcttgtcggtacacctgtaactgcatcgaactatcacggctggccgtttggcgatactgcgtcccccatattcaaccacgttattgaatatatttaccttgcgtttgtgatcacacaattcattctggcccttggaaatcggccaaagggatcgcaagtgacctatctggtgttgttcgtggtgtttggatttattcagctctacatcatcattctgtcattctatctggtttaccgggcactacggactcccattggggaacagatcgacacgtcttcggccgcagcattctttgagagcatgtttggaggaacgggagtcgccggcgtgattttactagccttggtcaccatttacggcttgaactatgttgcctcgttcctctacttggatccttggcatatgtttcactccttcccgcagtatatcattctcgcttcgacatatattaacattttgatggtgtatgccttcaataactggcatgatgtttcttggggcacaaagggctcagatgaaagcgaaaagctcccttcggccaatgtgatcaaagactcgaaatccggtgtcgagatggtcgaagaagaggagatgcaacaaacagatattgaccagaagtttcaggagaccgtgctaagaactctggcccctgtcgaagtggaagttaccgtagaaaccaaggaggtcgatgacacgtataagtcgtttaggacccgcttggttgtctgctggatcctgtcgaatatgctgctggtcgggattgtcacctcggatgatttcgcatttcttggcgttggtcctctacgacccggaccgccatactacttcaaatttcttctatatgccactgctttcttgtcgattatcagattcttagggtttctttggtttctcggacgaacaaacattatgtactgctttgcgaagaggtaa

SEQ ID NO: 311 - DNA, 4648 bp, Botrytis cinerea
  source 1..4648: mol_type = genomic DNA
aaaccttccttccgagccaggatatcgagctttcgacgtcttctactacctcctcacatctgcatcgactcctgccgaacgagaattcttgagcttaaagcaagcttctagttacgcgcttctagaaaagtctggaacatatggccctccaccgtaccttcctactgcggatgatgctgctgctgcagacgacttcagagcatcattaaaagctattggtatcaagggtgccgcacacagagatctcatctcaatattagcaggattactaaagctaggtgataccttgagctttgttcttgatggggatgcgttggaggaaatttgtgaggatgttggaggtctgcttggtttggaacccgatgttctcgtcaagcaatgcacaacccaagagcgagaaactttgatcggtggtctctatgaagcccttgtagattgggtaattctgaaggccaacgaagccattgctagtgagatgctcaggatcaaggacggtgattcttccagtgaagggggaccaggagctcgaaccccaaatacagaagacgacaatggtgatactgtctgcataactgttcttgagattccagacccaaatcctgggaaagcggctgcagtgcgaggtgtctttgacgatactcagggtattaattccgaaatgaaagaagatggtgtggatgtagtttctgctggctcaacggttatccgagagatgcaaaatgctgtatccgaagttgctccagatctcggtatcatgactggaccttctgggagagatcgtgaacacgagcttgagaagcgtgagatcgtattagagaaggttgcccgcgagggagaagatgatggtttcctcaagaagcttctgctcccaatcgagggtcaaggtattaacctaggccgcaacggtcgtattgacctaccttccgttcttggtagcagtcgcgtctggtatcacttatctatgcatccgaccgacgattcacccgcagctctcgcttcgcttccttcaacaacttcggcttggtccgcgggtgctatctcacgccaactccgcgcctggcgtttgccagagtgggcaaatcgacgaaacaaaaacttggattttacagccgatttcgatttcgaagaatttgttcaacgatatgccccccttggttgtaaggatggccgtgatggcattgaaagctgggtcatggagcgtggttggagcaatggtgaagttgtcataggcaaagagcgaatatggatccgcgaaagtgcttggtgggaagctgaaaccatgcttgacctaaagccggccgaaggggagttccaaagtatgggcggtcctggaggcatggcaggcatgctaggagcccacgacatgaacacaggatactcctccaacccaccaaatggaagtggtttctttgccggtcccaataatgatctgacgcctcttgggagtcacgataatatgatgaatcgacaaagtcaagtcaacgtggcccggagtaacctcggggctcccaccatcgcaccatcaagaaatatcagtggtggtgactatggactcggcttcaagggagataatacgaggggccaggtttattacactgatgagaatggagaaatggtggatgatcccgaaggtggcaccccgaaagctgtcgtcagcgaggcagcaacaaaccagcgtcgtatctgggccgccattacctgggctttcacgtggtggattccttcattcctcctctcatttattggtcggatgaaacgaccggatgtacgcatggcttggagagaaaagctagtgttgtgtttctttatcctcttcatcaatgccttggttattttctggattattgaatttggtaaactcctctgtccaaattccgataaagcgtggaatgcaaaagaagtcgctactcatcaaggagataacgatttttgggtcagcattcatggaaaagtatacgatctttccaagttttggaagttgcagcacagtgataccactgtcgagacaacctctgatgttatgcaaccatttgctggtttgaacttggacagttacttcccgccaccattgactgttgcatgccctggccttgtaaccgattacaccgtggttttactggacaatagtactgttgaatatccttccggggtccatacatctggcaacctttcagcatatacaaccagtaaactttacgactggaattggtatgcggacgtgtacacacctgcaatcaaagagtattaccatggtgatctagtggtcaagaatagtgcgatcaagagtgaaggccaaaatgaaaatcattattgggttatatcacgagtgatggatgacaattacaaaacagccaacgcatcttatcaagtggatatcctcaacaacttgaattgcatgaacaatttgttctatgcaggcatccctgattttcgagattctattagatgtcagatcaacaactacatccttctcgctttcacaattattgtgtgtgctgtcattgtcgtcaagttcgtgtctgcacttcaatttggttcgaagcgtcgtccaactcctcaagacaagttcgtcatttgccaagttccagcatacaccgaaggtgaagactcattgcgtaaagctttggactctgttaccgctctacaatacgacaataaaaggaagctcatctgtgtcgtttgtgatggcatggttgtaggaggtggtaatgatcgccctacaccaaagattatcctcgatattctcggtgtagatcccaagatcgaccctccagccttaccgtttaaatccgtcggagatggcaacgagcaactcaactatggtaaggtatactcaggtctatacgaatttgaaggaaatgtggtaccatatattgtagtggtcaaggttggcaaggaatccgagcaatccaaatcgaagcccggtaatcgtggaaaacgtgacactcaaattattctcatgagtttcctcaatcgcgtccatcacagagcacccatgaacccattggagttggaaatgttccatcaaatcaacaacattattggcgtagatccagaactttacgaatatctactgatgattgatgccgataccagtgtaagggaagactcgctgaatcgtctcgttgctgcctgtgtcaatgacggtaaaatcgctggtatttgtggcgaaaccaatcttgaaaacgaagagcaatcttggtggactatgattcaagtttacgaatatttcatctcgcatcatttggccaaggcctttgaatctctattcgggagtgtcacttgtttacctggttgttccactatgtatcgtctacgtaccgctgacaaaggcaaaccattgattatcgctgatgccatcattgacgagtacagtgagtgtgttgttgatactttacacaagaagaatcttctgtctcttggagaggatcgattcttgactacgttgatgaccaagcacttcccatacatgaagtacaagtttattccagatgcatacgctagtactgccgcacccgaaacctggagtgttcttctttctcagagaagacgttggatcaattccaccattcacaatctagctgagttggtccgacttcctgaactgtgtggattctgttgtttcagtatgagattcgtcgtcttcatcgatctgttcggtacaattattcttcctgcaactacagtctatctaggatatctgatctacaaagtcgcaacgcatcaaggtcaattccctctcatttcgatttgtatgattgctggtacatacggtttacaagctttgatatttattctcaaacgtcaatggcaacacattggatggatgattatttatatccttgcattcccaatttactctttcattttgccaatctactcattctggaatcaggataacttctcgtggggtaacacacgtattgtcctgggagaaaagggagctgcaaaggttgtggccgtggacggcgctgaatttgacccaagaagcattcctcttcagcgatgggacgattacgcctcacacaacaaccttccaggacgtcgtggagtaccagtcgaaaaggcatacgatacattcgatgatcaatacgaaatggatgacatgaaatccatgtactcatctgtcaagccagcctccactattttaactggtttccctggtcgcggtccatacatgcctcctcaatctacttactccgcaaaccaatacactgaccaccctgtccgcaatcattctgcaatgtcccttcgccaacaagatcgttccgcctcaccatatcaagactaccctggcaacaatcgtccttcgatgcaaatgatgtcttcggataatcttctcggtggtggtccaggacgacatcaatcacgctcgtcggtaggcttcacaggtggtgctcgttcaccattagcaggagctggtattgatagacctgctagtggatttgatttccaaaggggtaccgccggtccagatgatttgcagattgtagaggctattcaaaactgcttgagggaggtagatctagataatgttacgaagaaacaggttagagctttggtagagcagaggttgcagacagagttggttggtgagaggaggacatttttggacaggagtattgattctgagttggctgctatgtaa

SEQ ID NO: 312 - DNA, 259 bp, Botrytis cinerea
  source 1..259: mol_type = genomic DNA
catttcggaggcggtcgaaactcgccggtttcatgcgtgcctctcacttcttcagtgaagctcgaaggaaccacgcttgaccaagttaatatgttcaccctatgtctatttcaggatgtgttcagcaaagcttacaaatcgaatcctgatagtatgccgtactttttggttcctatcaattgtccaaatcacactggggactggaaagattatgagcccatgtcaataattgattgggaaactgttcaatatgtccaag

SEQ ID NO: 313 - DNA, 200 bp, Botrytis fragariae
  source 1..200: mol_type = genomic DNA
gcatggcaagaggcagaacataatcctggaattgttcgtacatctattatgagcctcgatgatttaaagattgagctctgccttccgatcgagccaccaccaattccgcccttgacacttcactggaattccagcacagagctgtctgtcgagtttacaaacgatgccgaaataggaaccaccgaggacatgatattacg

SEQ ID NO: 314 - DNA, 210 bp, Botrytis cinerea
  source 1..210: mol_type = genomic DNA
agaagcagattgttattttggccatctcaccatcatcgcagatggatatgcctccaaattccgcaagcaatacatcaacaaaactcccattgtcaaaagtaaattctacgctctagaattaatagattgtcccatgccagctcccaatcatggaatcgtagtcctctcggacgtctccccagttctcctctatcaaatcggtacccacga

SEQ ID NO: 315 - DNA, 254 bp, Botrytis cinerea
  source 1..254: mol_type = genomic DNA
gcgaagttgatggagcaaaagaagttcatgaaaattggcttgtctacagaagctttccgatcctacgtcccaatcatacaaatggaggtggaaaactttatgaagcgttcttcggcgttcaaaggtccaaagggaactgctgacattggtcccgctatggctgaaatcaccatctacactgcttcgcacactctgcaaggaaaggaagtccgcgatcgattcgatacctcctttgcctctctctaccacgacct

SEQ ID NO: 316 - DNA, 209 bp, Botrytis cinerea
  source 1..209: mol_type = genomic DNA
ttcaacgctgtcaactgggtagaatcatctgcatgggatggaagagacgccattgtcgttgctggagatattgctctatatgccaagggtgctgcacgtccaactggaggtgctggagctgttgccatgttgattggaccaaatgctccagttgttgtcgagcctggtcttcgcggatcctacatgcaacatgcctacgatttctacaa

SEQ ID NO: 317 - DNA, 186 bp, Botrytis cinerea
  source 1..186: mol_type = genomic DNA
gtctggctaagcctagtcaattgaatgcgttcattcgttatagttcacagcagactgaaagtcatgatacgttaacagagacaactcgaaatattggcatcatagctcatatcgatgcaggcaaaactacaactactgagcgtatgctctattacagtggctatactcgacgcataggagacgttg

SEQ ID NO: 318 - DNA, 1610 bp, Fusarium oxysporum
  source 1..1610: mol_type = genomic DNA
atgggttttaatccgcaaggccaaggcaacggcccaaactatgatgcgccacgggaaatgcaagatttaccagctggccaagcttaccactttcgcgaatctgacgaaacagccgccgctcgtgtttctcctgtgagcaatccttacgaaccagactatgatcaattgtcccctccccctccgctgggcgcacaacgacccgtgcccgagcagaatgagtcgagccgcgatcttctacacagttcataccaaggcagcgtaggccataacagctttgacggccatagttttggtcacaatagctatggacctggtgcttttgggcattatcctgctgaccagcacggtcgcatgcctgggtctccgggctacgaatacccagagcctgagtacgatgtcgaagcttcgcgtttggcagaatctcgtctctccgtcatgcatcgcgcccctacgatgcaagattggggtcagaatggcgaggctctgtctgttccagactttgcccacggacgccccgactcaacgtaccaggagttcgatgtcgacgagagctggatgatgcgacagcagcagaaccaactcgcaggtggtctcggtcgctcaaagacccgtaaagtcaagctcgttcagggctccgttctcagcatcgattaccccgtgcccagcgccatcaaaaacgccgttgaaccgcgataccgaagcggtcccggaagcatggaggaggagttcacaaagatgcgctacacagctgctacatgcgaccccaacgatttcaccctgcgaaacggctttaacctccgccccaagatgtacaaccgtcatacagaactgctcatcgccatcacctattacaacgaggacaaggtgctacttgcgcgtaccctccacggaacgatgcagaacattcgggacattgtgaacctcaaacgctccaagttctggaacaagggcggtcctgcgtggcagaagatcgtcgtttgtctcgtctttgatggtatcgacaaggtcgacaagaacgttttcgacgtgctcgcgacggttggtatctatcaagatggtgttctcaaaaaggatgtcaatggcaaagaaaccgtcgcccatattttcgagtacaccagccaagtctccgtgacacccgatcaacagctcgtccgtcccgatcccgacaagcctcatcgcaatctcccccccgtccagtttatcttctgtctcaagcagaagaacagcaagaagatcaattcgcatcgctggctcttcaatgcctttggccgcattcttaacccggaggtcgccatcctcattgatgccggaacgaagccggccccccgcgccctgctgtccctctgggagggcttctacaacgatcgtgatctcggcggcgcctgtggagagatccatgtcatgcttggcaagggtggaaagatgcttctcaatccactcgtcgcggtgcagaatttcgagtataagatctccaacgtcctcgataaaccgctcgaaagtgcctttggatatgttagtgttttgcctggtgctttctcggcgtatcgcttccgcgctatcatgggtagacctctggagcagtactttcacggcgaccatacgctctccaa

SEQ ID NO: 319 - DNA, 4677 bp, Fusarium graminearum
  source 1..4677: mol_type = genomic DNA
atggcgagacgaatgtccatgtattcgatggcctccgaggctatgggcggtcctcaagctccccagcagatgtctaccacgactctcctgaatgccatccacaacatctacctgtcttctcaaccttatcagatcgatgccggtactagtctggttgtcaacacatggctcacagctgctcaggctggtgctactgttgatgctaccctcgctgctcgagcctgggagcatgctaggcgtcgtgctgaagatggatgtgttgttttaggttcactccaccaggcaactccctcgcttctcgtgccgttcctgaacactttcccgttcgccattcccgcatccatttacaagtcattggaggctgtacaaccgtttctccgatgtgtcactccatacaacgcttcggcccctcgacagatcgcactcggcgttacactgacattgagtttgggaggaagtgtcacaggagcctctctggccttgtctcaaggtggaatcgatactgagaatggattgctcaacgttcctgccgaggctggataccgtgcttttgacgttttctactatttgctcacatccgcctcgacacccgcggagcgagagtttctaggcctcaaggcgccttcagcgtatgctctccttgctcgctcgggtacttacgagcctccttcttacctcatcaccgccgatgatggtgccgctgccgacgactttcgccaggcactcaaggagattggtatcaagggatctgtccaccgtaacttcatctctaccttggctggacttctcaagcttggcaacactctcgactacgatgccgattccgacgatttcgaggagatctgcgaagatgtcagcggtcttcttggtatggagcccgaggttctcatgcaacagttgagcactgaggatcgacgaacacttgttgctggcttgtatgaggctctcgttgactgggtcatttccaaggccaacgctgccattgccgctcagatgctccgtatccgagatggcgatgagtctgttgatggtcgtggcgtccgcactccaaacgaaaacgaggatggtgacaccgtttccatcactgttgttgaagtccccgaacccgctctcggcagggctttggccatgcgaaccattttcgacgacactttgggcattaacgctgagatgattgaggatggtgtcgagatccaccctgcttcatcttctgttgttcgggagatgcagcaggccgttgccgatgtcgcgcccgatctgggcattatgactggtccccagggccgagaccgccagcatgatattgagaagcgagaagtcattttagagaaggctgcctacgcttctgaggaagacagcttcctgaagaagttgttgttccctgttgagggtcaaggcatcaacttgggccgaactggtcgtttcgatctaccaggtctcctgagctctagccgtgcctggtttcatctcgctctgcatcccacagacgattctcctgctaacttggctacccttcctgctatcacctctgcgtggtcagctggtaccatttcccgacagctccgttcttggcgtcttcctgaatgggccaaccgtcgtaacagaagtctcgactacacagctgattttgatgtagacgagttcgttggtcgttacggcgcactaggctgtaaggatggcaaggacggtatcgagacttggatgctcgagagaggctggagcaacggcgaagtctttattggcaaggagcgaatctgggtccgcgagggtccttggtgggaggcagagagcatgctcgacatcaagcctgctcacagtcttcaaagcataggtcaaaatccgttcacatccggttttgacacaagctactcagccaacccacccaatggcagcggcttcttccctgctcccgctatggacaacagcatgaatggcagcaatgaccagctcatgcatacccgtaatttcagccagggcaacatgagccaagccactttcaaccaacaccctcacttgaaccctcaatcagcaccttcgattgccccatctgctatgcgcaatgctcagcccgctaccggtgactacggtctcggtaacaagggcgacacctacaagggacaggtattctataacgatgatggagacttcactggtaagcttgatggagaccttgccaaggacaagaagatcgaaaccaagcccctgacctttggccgacgagcttgggttgcttttgtttgggccttgactttctggattccttcacctcttctcaagtttgttggacgcatgcgacgacctgatgtccgtatggcttggcgtgaaaagctcgtcttgttcttcattatcctccttcttaacggcttgattatcttttggattatcggtttcggaaagcttttgtgtcccaacgccaacaaggcatggaacgttaaggaggttgctggccatgcagaagatgaggatgctttctgggttgctatttttggcaaggtttacgatatcaccgacttctggcgacaacagcacagtgataccagcattaagaccaccaagacgaacatgttgcccctcgctggtatggttatggataactacttcatgcctcccctgaacagagcttgcagaggcctcggcatcaaggagactgttcaactcaccttcaacgagactataacgaaccctcttgcacagcatgtttctggtttctacactcgcgaccgtaccagtgctcttcacaacgctgactggttctggacgactttccagcccaagatcaaggaatactaccatggtgatctcgtttggaaagaaggcaccgttaagagccagggctcaggtagcgagcagcatccatgggtcatgtacggtaatcagatctacgatcttacggattatctgcacaccctagatgtcaacgacaacttcgatacctacaagttcttgaacgaggacatggtcaacttatggaagaacagccccggtaccaacatcaagaaggatcttgaccttctcatttccaacgcaaagaatgagactgtggccgccaaccttaagaacagttggcagtgcattcaaaacattgcgtacaagggtatcgtcgatttccgtgactcaccccgctgccgtgtcaacaactggctccttttggccttcgccattatcatctgtatcgtcaccgctgtcaagttccttgctgctctacagtttggttccaagcgacgtccttcgccccaggataagtttgtcatctgccaggtgcccgtctacactgagggtgaagattctcttcgaaaggcattggactcgttgacggctcttcagtacgacaacaagcgcaaacttatctgtgtcatctgtgatggtgtcgtcgtcggtgaaggcaacgatcgtcctacacccaagattgttctcgacattctcggtgttgatcccaaggttgatcctcctgcgcttcccttcaagtctgttggcaacagtgccgagcagctcaactacggtaaagtttactctggtctgtacgagtttgagggcaacgttgttccatatatcgttgtcgtcaaggttggcaaggagtctgaacagaccaagtctaagcctggtaaccgtggaaaacgtgactctcagattctccttatgagcttcctgaaccgtgtccatcatcgcgctcccatgtctcctctcgagcttgagatgttccatcaggtcaacaacattattggtgtggaccccgaattgtacgagtaccttcttatgattgatgccgatacctgcgttgaggaagacgccttgaaccgtcttgttgccgcctgtgcccacgacgcaaagattgctggtatttgtggtgaaaccgccctggagaacgatgaaaagacttggtggacaatgatccaagtttacgagtacttcatttctcatcatcttgccaaggcctttgagtctctcttcggcagtctaactcgtcccagtttcaccatgtaccgtcttcgaagtgttgacaagggcaagcccctgattatctctgatggtgtcattaaggattacagtgtttgcgacgtcgacaccctccacaagaagaaccttctgtctcttggtgaggatcgttatctcaccaccctgatgaccaagtacttccccgagatgtcctacaagtttatccctgatgctcagtgtaagactgctgcccctgaatcttggagtgttttgttgtctcaacgtcgacgatggatcaactcgaccatccacaacctggttgaacttatgcaactcaaggagctctgtggtttctgctgtttcagtatgcgcttcgttgtgtttattgatcttaccggtaccatcattctcccttcaaccaccgtctacattggttacctcatctacgtcttggctaccggcactggacccattccgtacatttctcttgctatgattggtgccgtttacggtcatcaggctctcatctttattctcaagagacagtggcaacacatcggatggatgattatctacatccttgctttccctatctactccttcattcttcccctctactccttctggaaccaggacaacttctcgtggggtaacactcgtatcgtcattggagagaagggtgacaagcaggtcgttgctgttgacgatgagggcttcgatcctcagtttgctggcgaaaggtag

SEQ ID NO: 320 - DNA, 6546 bp, Fusarium graminearum
  source 1..6546: mol_type = genomic DNA
gaactcaaaccaccaaaaaccaaccctcgcctctcccctttgctactctttgcattacgcattgccgacactcgttttacggcttcgtcaaatcactccgtctcgcccttttttgcgaccgagactacacaagccggtgaatcactttctcgtgattgattcgtctttttgaacttgaatcgacgccaaattacatctttttcgttggcctttcggaccagagtcacctctccctaagccatttgacgtttttgacgacaacatcttgcagtgccggtcacgcttgttcttccgcctgatcttgaatcacatcacgctcgttgatcatccacatgtgtatctctagataatctaataactcaacatgtcgggatatccgggcggtggtcaacgcgaccactatgacgatggctacggccaccctcagggaggcaaccaacagcaaggtggaaacacggattcctactatcaagacgatcaatactatgatcaaggctatgacaaccgcggccacaataataataacccgaataacaacagcaacaacaacaacgagggctactatgacgaatctggttattacaacgccgaccctaacaacccttatcaacatgacggaggctactacgacggccacgaccagtatcaagatggctattatgacaatggccagggtggatactacgaccaggactatgatcgtgggcaccaaggacagggtgcccgtcaaggctctgaggaagattccgaaacgttcagcgacttcaccatgaggtcggacatggctcgcgctgccgagatggattactacggccgcggggatgaacgttacaacagctacaatgacgggcagcgtggttatcgacctccctcctcccaaatctcttacggtgggaatcgctcgtctggcgcatcaaccccgaactatggtatggactatggcaatgctctacctcctggccagcgttcccgggaaccttatcctgcctggacttccgatgcacagattccgttgtcgaaggaggagatcgaggacatctttcttgacctttgttccaaatttggtttccagcgagacagcatgcggaacgtgtacgaccatctgatgatccttctcgactcccgagcctctcgaatgacgcccaaccaggctcttttatcccttcacgctgactacattggcggcgataacgctaattaccgcaagtggtacttcgccgctcatcttgaccttgacgatgccgtcggatttgccaacggtcttggaaagggtaggaagaagaagggtagcaagaagaagaagaaagacccagaggccagtgaagccgagactttacaggatctcgaaggtgacgaaagcctcgaggctgctgagtatcgttggaagacacgcatgaacaagatgtcccagcatgatcgaatccgacaaattgctctgtaccttctctgctggggcgaagccaaccaggttcgcttcatgccagagtgcttgtgttttatcttcaagtgtgccgatgattatctcaattcccctgcatgccaggctctcgttgagccggttgaggagttcaccttccttaacaatgtcatcacccctctctaccaatacttgagagatcaaggttacgaaatctctgatggtgtatacgttcgacgtgagcgtgaccacaagaacatcattggctatgacgattgtaaccagcttttttggtaccctgagggaatcgatcgcatcgtcctgcacgacaagagcaagcttgtggatgtgccaccagccgagagatatgtgaagctcaaggacgtgaactggaagaagtgcttcttcaagacttaccgcgagtcccgttcctggttccatcttctggttaattttaaccgcatctggatcattcatttgaccatgttctggttctacacctctcacaatgccccaagtatcctggttggtccaaaatacgaacagcagcttaaccaacagccctcaacagccaagtcattctctatcgtagggttcggtggtgctattgcttctcttattcaggttcttgccactctcgccgaatgggcctatgtgcctcgtcgatgggccggtgcccagcatcttaccaagaagctctttttcctgttgtttatcctggtactcaacatcgctcctggtattaaggtcttctttcttgagggtattggtggaaagaagatcgacactgccattggtatcgtccatttcgttatcgcattgattacgttcttattcttttccgttatgccacttggaggcctttttggcagttaccttgctaccaacaacaggaagtatgttgccagccaaaccttcactgctagctggcccacgctccgtggtaacgatatggcaatgtcctatggactctgggctgtcgtctttggcgtcaagatgggtgtttcatacatctacttgattctgtccttccgtgaccccattagatatctaagcatcatgaaggtcaactcttgccagggagacgctcttctttttggaaatcagctatgcagatggcatccaacaattgttctggcactgatggcattcactgacgttatcttcttcttcctggatacatacctttggtacgtccttctcaacaccgtcttctcggttgcccgatcattctacatcggatcttccatcttgacaccttggagaaacgtcttttcccgtcttcccaagcgtgtgtactccaagatcctcgccaccaccgacatggagatcaaatacaaacccaaggttctcatttctcaagtttggaacgccatcgtcatctccatgtatcgggagcatctcctcgctatcgagcatgtccagaagctattgtaccaccaggttccttccgagcaggagggcaagcgaactctgagggccccgaccttcttcatctcgcaggaagatcattctttcaagaccgaatatttccctgcttacagtgaagccgagcgtcgaatctcattctttgcccaatctctgtccacacctatcccggagcctttgcctgtcgacaacatgcccacgttcactgtcatgattcctcactacggcgagaagattcttctgtctcttcgtgaaatcattcgagaagatgaaccatactcacgagttacacttttggaatacctgaagcagcttcatcctcatgagtgggattgctttgtcaaggataccaagattctggcagatgagacctctcaattcaatggagaaaacgacaaggacgagaagaacactgccaagagtaagatcgatgatttgcctttctactgcatcggttttaagtcttctgcgcccgagtacaccctgcgcacccgtatctgggcatctcttcgtttccagactctctatcgtactatctctggcttcatgaactacagccgtgccatcaagcttctgtaccgcgttgaaaaccccgaggttgtccaaatgtttggtggtaatactgataagcttgagcgagagcttgagcgtatggcccgtcgtaaattcaagattgtggtttccatgcagagattctccaagttcaagaaggaagagatggaaaacgccgaattcttgcttcgcgcttatcccgacctacagattgcttatcttgacgaagagcccccagttgcggagggcgaagaacctcgtctgtactccgttctcatcgatggtcactctgaggtcatggagaacggcatgcgacgtcccaagttccgtgttcagctctctggtaaccccattctcggtgacggcaagtctgacaaccagaaccactctatcatcttctaccgtggtgaatacattcagctcatcgatgccaaccaagacaactatctagaggagtgtctcaagatccgaagtgtcctcgctgagttcgaggagatgaagaccgacaatgtctccccttatacccctggtgtcaagaacaatgtctcctcgcctgtcgctattctgggtgcccgtgagtacattttctccgagaacattggtattctaggtgatattgctgctggaaaggaacagacattcggtacactattcgctcgaactatggcacagattggtggcaagcttcattatggtcatcccgatttcctcaacggtatctttatgacgactcgaggtggtgtttcaaaggctcagaagggtcttcacttgaacgaagatatttacgctggtatgaccgctctcctccgtggaggacgtatcaagcaatgtgaatacttccaatgtggaaagggtcgtgatttgggtttcggctccgttctcaactttacaaccaagattggtactggtatgggtgaacaatttctgtctcgcgagtactattaccttggcactcagcttcctctggatcgcttcttgtccttctactacgcccatcctggtttccacttgaacaacatgtttatcatgttctcggtacagatgttcatgattaccatggtcaacctgggagccctccgtcatgagactgtggcctgcgagtacaaccgaaacgttcccatcaccgatcctctctaccccagcgggtgtgccaacactgatgcgcttacggattggatttaccgatgtatcgtgtcgattcttttcgttctgttcctctctttcattccccttattgtccaggaactttctgaacgtggcatttggcgtgctttcattcgattgatgaaacagttttgctcgttgtcgctcatgttcgaagtcttcgtctgtcagatctacgcgaactctgtacagcagaacatttcgttcggtggtgcgcgatatattggtacaggtcgtggtttcgccacggcgcgcattccctttggtgtcttatactctcgattcgctggaccagctatttacttcggcgctcgtttgctcttgatgcttctgttcgcgaccctcactgtctggaagggtgtcttgatttacttctggattacccttcttgcgctgacaatttcgcccttcctgtacaatccccatcaattcgcttggaccgactttttcatcgattaccgagattaccttcgttggttgtcgcgtggtaattcccgcagccacgcttcatcttggatctcgtactgtcgtctttctcgaactcgtcttacaggttacaaacgcaagacacttggagacccgtctgccaaagcatcagctgatgtccctcgagcccctttcgcaaacatctttttcagtgagattttctcgccattgatgcttgctgttgtaacgattctgccgtatctttttgtcaacgctcaaaccggtgttactaagcagagcaatccaaacttcagaggcaagatccaaccgacgcaatcgctaatgcgtctactcatcatcgcttttgcgcctgttgccgtcaatgcaggtgtcttggctgctatgttcggcatggcttgctgtatgggacctctcctcagtatgtgttgcaagaagtttggcagtgttctcgcagctattgcccatgccacagctgtgatcttccttcttatttccttcctgggcatgttcattctggagagctttaacttcacccgcactgtagcgggtatgatcgccgtggtctcgattcagcgcttctttgtgaagcttattgtttcgacctgtctcactcgtgagttcaagggcgacgcgtctaacatcgccttctggagcggaaagtggtactcgatgggatggcacacaatctctcagcctgctcgtgagttcctttgcaagatcaccgaactttccatgttctctgccgatttcgttcttggccactggcttctcttctttatggcgcccgtcatcttggtccccaagattgatactcttcactctatgatgctgttttggcttcgtcccagtcgccaaattcgaccccctatatactcgatgaaacagtccaagcttagaagaagacgtgtcatccgctatgccatcctctacttcaccctcctggtcgtattcatcgctctcgttgctggacctgctgtagttggtaaactcatgggcgaatcactcagcaagaccatcgaaaagatggttcctatgcagggtcttgtgcagcccaactatcttcacaacaacaacactaacagcaccttggcaactggtatcaagaaccctagttacaccggcgctggtctcacaatgactggcagcaagcgcgtccaggcctcggctactggcaagatcaagctgttttgagcgaaaaaagactgggagacagggtctgtctttttggacatttctcggacacagtcgtcgctctctgttcctatgcacagaagaaagttatcaaaatatgaagtttttgctttttcgtttttgcttttgcttttcagttcagtacctagcacaggtggatgcgtatgtacacattttgcattttatttagaagcggaagggtggtgagaggtggaaaggaggtcagcaacacaagccagacctgacctgacctggcattcactggttgaactgaagtggtctttttttgttggcacaaggcgcacctttttaacttattctaatgtgtacaatgaaaggaagcaaca

SEQ ID NO: 321 - DNA, 3504 bp, Fusarium graminearum
  source 1..3504: mol_type = genomic DNA
atgaacgacgatgacgcgattcacaacatccacaagaagatagagcgggaaaaggccctcatcaacgctgccaattctatgagggcacagacaaacaatgaagccgttagatcccgtctcgactcccagatgcgcgatggccgccgcaacctccagtttttcgaggagaagcttagggatattcagctgcgccgtgtgaaccaaggtgttggagacatgtctctcgggggacctgctgacgatgccggtggccctcccgcaccacctcctaaggatgcctccagcaatcccgcgggagatagaggttcctacggctctggttcgggacagtacagccaggctggcggtggttccgacttaatgccccctcgtcatccttatgcaccgggacctggtggatcgggtattcctaaggcacgccccaactttaccaagttagacttaatcaaatatgatacgccacacctgggccctcgtattcaactcatgttgtcccagatccagttcaagctcaatgtcgaggagcagtacctgaagggtattgagaagatggttcagctttatagcatggaaggtgatcggaagagcaaagccgacgcagccgctaggaaggttgaaagcaagcagaagattctactgttgaagcaggcactcaagagatatgaagaactgcatatcgacgcggacgttgcggatgcacaagatggtaagttggcgttgaatgacgtcgaatgtgaagctgacaaagagttagatgattcaatcaacgcccccaacctcaggaagcccctcagtggacaactctcgattcgaatgatagcaatcaaagatgttgaccatgctgcgactggacggttcacgagaggtcccgagacctttattgccgtgaaggttgaggataccgtcatggctcgtacgaaagcgtccaggaacgatcgatgggaggctgagttccatactatcgaagtcgacaaggccaacgaaatcgagttgactgtctacgacaaacctggcgaacaccccatgcccataggcatgctctgggttcgcatttccgacattgttgaggaaattcgtcgcaagaggattgaggccgaaatgaacagctctggctgggtgtctgccgacagaatgggcagcaccagtgctgcccctacacagttcccgatgagtccttcttcaggctcttttggaccaggtgctcaatcgactggtggtgaccaaggggatgatactggcccattcggagctgctggtccccagcctcaggtgcaaactggacctatcgaggaatggttcaatctcgagccaactggacagatccaacttcagttgacatttaacaagtccaacaacaacagccgccctgccgaccttggtcttggtcgaaagggtgccgttcgtcaacgaaaggaagaagtccacgagatgtacggacacaagttcgtgcagcatcagttttacaatatcatgcgctgtgcgctttgcggagatttccttaagtactcagcaggcatgcagtgtgaggattgcaagtatacctgtcatacgaagtgttattctagcgtcgttacaaagtgcatcagtaagagtaacgctgagactgatcccgacgaggaaaagatcaaccaccgcattccgcacagattcaacccttattccaacatgacagcaaactggtgttgtcactgtggttacatcttgccttttggaaagaagaactgcagaaagtgctcagaatgtggtcttactgcccacgcccagtgtgttcatcttgtccccgatttctgcggcatgtcaatggccgtcgccaaccagattctggacggcataaggactcagaagcaaagacaagccaaggtttcttcactttcagaaaagacacttcgacatggcaagactagcccgacaagcaccagctcgccggctccctcatactccagcacgactgctccttcttaccagtcaggaccagtctccccggaggctacagaggccgctaagatgatgtactcgaacccttccacgccgagacctgccggccctgatcgaacttcatccagctcccaagctgcggctgcagcatctgcggctatgtctggaggacctggtgcggcccaacggcagaactcagactttgggcgatatagcggcggttacgatcaaccgcaagaagacccctatgctcaaggaggtcaatacggcgcgggccagcagcgtaagtacaacccggccgattatgcgaacgtgaaccctggctacggaggaccacagcctgctgctcaggctcagcgacctgtacagcagcagccagcccaacaacctcctcctcagtcaccgctacctccagtaccgcaacaccaacaacagcagccacaggctgcctaccaacagcccgcagtgccggcgcatagccctcagcaaccagaacccatgtctcctaagcagcagtcagcggctggtggtaagtctgctcccttggctactgaccctggaactggccagcgtatcggacttgatcatttcaacttcctggctgtgttgggcaagggtaacttcggtaaagttatgttggccgaaaccaagcgctctcgaaagctctatgccatcaaggttctcaagaaggagttcatcatcgagaatgatgaagtcgagagtatccgttctgagaagcgtgtgttcttggttgccaaccggggcagacacccattcttgaccaacttgcatgcatgcttccaaacagagacccgtgtgtacttcgtcatggagtacgttagtggtggtgatctgatgttgcacattcagcgaggtcagttcggtactaagcgtgcgcaattctacgccgccgaggtctgcctggcgctcaagtacttccacgagaacggtgttatttaccgtgatttgaagcttgacaacattcttctctcacttgatggtcatgtcaagattggtgattacggtttgtgtaaggaggatatgtggtatggctccacaacaggtaccttttgtggtactcccgaattcatggccccggagattctcctggacaagaagtacggccgtgctgtcgattggtgggcatttggtgtgctgatttaccaaatgcttctgcagcagtctcctttccgtggagaggatgaggacgagatttatgacgctattctcgccgatgagcccctgtaccccattcacatgcctcgagactcagtctcaatcctccagaaattgctcactcgtgagcctgaccagcgactcggaagcggcccgactgatgcccaggaggtgatgagccagccattcttccgaaacatcaactgggatgagatgtaccacaagagagtgccgccgcctttcatgccgcagatcaagagtgcgacagataccagcaacttcgactccgagttcacaagcgttactcccgttttgactccagttcaatccgttttgtcacaggccatgcaagaggagttccgaggcttctcatacacagctgattttgactaa

SEQ ID NO: 322 - DNA, 5592 bp, Fusarium oxysporum
  source 1..5592: mol_type = genomic DNA
atggctatgagcctcccacagctcggcggcgcaggaggccctcacactcaaccctctttgccatcgttgccagcacatcttcaatccgatacgcatctcactgctcatctcgccagtcgcttccatgtctcgcatcctaccgctcgactgtcttctcacgctctcatctctctcaacacctataccaactcctcaaagggtcccgatggcggcaaggaggggagcgccatggctggcgccgaggaaatcgctgacagagcttttctgcgattaggacacagatccgagaaccaagccgttgtgtttttgggtgaatctggcgctggaaagtctactattcgagcccacctcctgactgctcttctcaacaaatcatcgacgcctctgtccacaaagctctctctcgccgcatatgtctttgatagtctcacaactaccaagactgccacaacacccactgcttccaagtccggtctcttctacgagttgcagtacgatacttcagccacaacaaaccctgttctgattggtggtaagctcttggatcatcgtctggagcgtagccgtatcgccgatgttcccacaggagagcgtaacttccacgttctttactatcttcttgccggaacaagcgaggctgaaaaatctcatctcggcttggacggtggttctgccactggaaccactcaaaagcgatggaagtatcttggccatcctactcagctcaaggttggaatcaacgatgcagagggtttccaagttttcaagaatgctctgcgaaagctcgagtttcctcgcgccgaaattgccgagatatgccaaatcctcgccagtattcttcacattggtcaactagagtttgagacaactagccagaccagcgtcactggcgatgatagtggtggtttctctcacgagggtggtacaaccattactgctgtcaagaacaaggatgttctcagcatcatcgctgctttccttggtgtcagcgccgctgacctccagaccactttgggctacaagaccaagatgatccaccgagaacgtgttactgttatgctcgaccctaacggtgctcgtgctcacgccggagagcttgcccgaacactttactctcttcttgtggcttggattcttgagaccattaaccagcgactttgtgctcccgaggagtccattgccaacactgtctcgatcgtcgatttccccggtttctgccagcaaactcccactggctctgcgctcgatcaacttctcaacaatgctgctaccgagtgcatttacaaccttactctccagaacttcttcgaccgcaaggctgatatgctggagtctgaggaagtcagcgttgctgcgaccagctatttcgataactcggacgctgttcgaggcatcttgaagcccggcaacggtcttcttagcattctcgatgaccaaactcgacgaaaccgaacagatatgcaattccttgaggctcttcgaagacgtttcgatggcaaaaacgctgctatcgaggtcggctctgcccaagctaagcttcctggaagcaacttcatgactgagaacacatctgctgtcttcaccgtcaagcactttgctggtgaggttgattaccccgtcaagggtctcatcgaagagaacggcgagatcatctctggcgatctcctcaacatgattaacggcactaagagcgagtttgttgcccgccttttcggtcaagatgctctccagactgtcactcaccccaatgaacgcactaccgttatgcaggctaccgtcagctcaaagcctatgcgagcgcctagtgtcatgtctcgaaagacgcatcgaactggtcgtcctagcacagcttacaagcgccagcagcaagaggccatggaggagttagatcagcagagccaggctggagagtctaagaagaacgccaagatgactctcgagcaaggtgcttcaggccagttccttgcctccctggacaatgtccagaaggctgtcactgaccctggcaccaactcatacttcgtcttttgcttgaagcccaacgatcgacgaattgcgaaccagttcgacagcaagtgcgttcgtatgcaggtccaaactttcggtattgcagaaatcagccagcgtcttcgatctgctgatttcagtttgttcttgcctttcggcgagtttctgggtatgacagacccggagacaatcttggtcggcagtgaacgagagcgtgctgagatggtcattgaagagaagcagtggccccagaatgaagtcagagtcggtgccactggtgtcttccttagcgaacgctgctggatggagattgcccagcttggcgaggcagtgtcagtttctggtcgctacggcggcttgccttcatcagatgctggtgatggtctcacacctgctgagtctatggctttcggtgcctccaaggaacatttggtttctggtggcaacacccctctcatgtacggtgagaaggccaagggtggttacttcactgatgacactcgatccgaggctggtgtttctgcctttggtggcggtgacatgttcaagaacctcgacacacgcgagcagatggctgagcgaggcaatgagaagtctctcgaggaggttgaggagtatagagataagcctagccgcaagcgttgggtggctctcgtcttcttcctcacttggttcatccccgattttgccatcagactgatcggacgtatgcctcgaaaggatgtccgtatggcctggagagaaaaggtggcgatcaacatgctcatttggttgatgtgtgctgtcgccgccttcttcatggtcggattccctatgctcatttgccccaagcagtatgtctacagctccaacgaactctcttcctacgacggtgacaagggcagcaagggcgcctacgttgctatccgcggtttcgttattgacctcaatgccttcattcccaaccattatcctggcagcaacctcgtcagcgaggatactctcttgaactatgccaggcaaggatatcatgcgctcttttccccatccaagtgtctgcctctgtgccagggcaaagatggtcagatccctcctgaggttactctcgacaaccgaaacaccaacatcactggtcagccccagcttcttgcctccagagatattgatgtcaactctgtctaccacgatttccgttatttcaccaatgacagccgacctgattggtacttcgagcagatgtacaccttcaagcatgtctacctcaagggacgaatgggttacagccctaagtatgtcaagaagctggcccgagatagctcttggaacgttgtcactatccacgggaaggtttacgacatgaccaagtacctccagggtggtctccgtttgaaggccaaggctggcaagcctactcccaacatcccaggtgccacagacttcatggaggacagcgttgtccagctattccgaagtgcaaagggccaagacgtttccaagtactgggataacatcaagcttagccctgtcaaaaaacaacgcatggagacctgcctgaacaacctcttctacattggtgactcagatactcgaaactccacccgctgtcagttcgctacatacttcatcttggctatttcagtcatgctcgcatctatcctggtcttcaagttccttgctgcgctccaattcggtggcaagaacgtgcctgagaacctcgacaagttcgtcatgtgtatgattcccgcttataccgaagatgaagactcgttgcgtcgtgctatcgactcgctttctcgcatgaagtatgatgataagcgtaagcttctcgtcgttgtctgtgacggtatgattatcggtcagggtaacgacaggcctacgcctcgcatcgtgctggatattcttggtgtcccagagactgtcgatcccgagcctctcagctttgagtctctcggtgagggtatgaagcagcacaacatgggtaagatctactcgggtctttacgaagtccaaggccacatcgttcccttcatggtcattgtcaaggttggcaagccttctgaggtctctcgccccggtaaccgtggtaagcgagactcccagatggttctcatgcgtttcctcaaccgcgtccactacaaccttgccatgagtcccatggagcttgagatgtatcaccagatccgcaacattattggtgtcaacccaaccttctacgaatatctcttccaaattgatgccgatactgtcgtcgctgcggactcagctactcgaatgatttcagccttcatcgatgatactcgcctgattgcttgctgtggtgaaaccgctctcaccaacgccaagggctctttcatcactatgattcaggtctacgagtactggatttcacacaacttgtccaaggccttcgagagtttgttcggctcagtcacttgtttgcctggttgtttctctatgtaccgaattcgcgctgcggagactggtaagcctttgttcgtcagcaaggagatcgttgaagactactccacgattcgtgttgatactctgcacatgaagaacctgctccatcttggtgaggatcgatatctcacaaccttgctcctcaagtaccactccaagtacaagacgaagtacctcttcagcgcacaggcctggactattgcccctgactcttggtctgtcttcctgtctcagcgacgtcgctggatcaactctactgtgcacaatttggctgagcttattcccttggcccagctttgcggtttctgctgtttcagtatgcgttttgtcgtcttcatcgatcttctgagcactatcgtccagcctgtcattgtcatgtatattgtctacctgatttaccaggtcgctaccaacccttcagttgtgcccattacagctttcctgctgctcggtgccatctacggtctgcaggctgtcatcttcatcctccgacgcaagtgggagatggttggttggatgatcatgtacatcgctgccattcctgtcttctctttcggtctgcccctgtactccttctggcacatggatgacttcaactggggtaacactcgtgttattgctggtgaagccggtaagaagatcgctgtttcagatgagggcaagtttgatcccaactcgatccctcgcaagaagtgggaggagtaccaagccgagctctgggagacacagacccagacagcccgtgacgatgtgcgatcagagatctctggttacagttatgccaccaaggctcaaggacccttctctgagtacggtggtggttaccagcccagccgccccggctcaacagctggcttcggccaccagaacatgtctcgcatgtctctggcccattctgagatgcctggcaaccgtgcgagccagtttggtggctcacagttcttctctcccgaggacctggttggcatgcctagtgatgacgccctcctcgctgagattcgtgacatcctcaagacagctgacttgatgactgtcaccaagaagggcatcaagcaagagctggagaggcgattcaatgttcccctagacgcgaagagggcctacatcaactctgcaactgaagccctgctttctggccaattgtag

SEQ ID NO: 323 - DNA, 1992 bp, Fusarium oxysporum
  source 1..1992: mol_type = genomic DNA
atggatctatcacagcgggcgcttccgcgtcacactcatcaccaaccaccaccatctctctcaaatccttcgccctcacatctgccgcctcaacattctacgtctacgtatagtcctggtcccgttgcctcgcatccaactctccctcttcccggaactcacccaccatcctcggctttgacaccaggatcggcctcaacatcccctgcatccatctcccaccggttaccttcagcatcagcttcgacgacatcaaggcatcctactggcgattatctccctgacgcagatgatcaagacgcgtcgacacccgtggatggagaggaacctccaaagaagaagcaaaagcgcaacaagccaactctttcatgccatgaatgtgtagagcgcaagaccaagtgcgacagaggtcgaccccattgtcttgcctgcataaaacgacagactgaatgccgatatgcccatgtcgcaaaccttctcgaggagaccaccaggtcagccgccaatggccgccgtatgacgaaacccccaaagaagaagtctggctctagtggaaagtcccccattccaaatatcgcagataggggtatgtcgaatgatcccagggcaacctcgcgtggcgctgttgccctctctatcggccttctgtccaacgttccttattccttgccttctgcaagtaacgtttttggtatcgggtccgagcacccatttgccaactactggacctgcgaagggggcttgcctgaggttatctcggtgcttccagacaagattcaagccgatatactacttagccgatacttcgaatgtgttgaccccgtgtatcccatgatacatcgccagacattctatgcggactacgaacacttctggcagatgaatcagcaagaaaagaccgatacagatccgtccttcattgcattaatctttgtcatgctggccctgggaactcagtttgtaacatcgactacatccccacaggagcgaaggcagacagcagagttctatgcttcggctagcaaccaagctctccgtatcgcatcatatcttagcagtgcatcgttacggtcaatccaggctatggtattgctagtgtacttccttataaacgacaaccatgcctcagatgggtgggcgtttgcaggtattctgattcggcaagcttatgctatgggtcttcatagagatccaaatattgtgactccaaatgccaccctgtttgagaagcagcagcggcgtaaggtctggcaagcggtacttctccaagatactttcttgaccgtcttactctccctgccaccgtctgcgacacatacagatgtttccgtggaagacctactcgacgatggctcctcgattgcaaatagcgacccaacagatacggcatatattcgaggctcttggactttggccaacttggttcaggagacgatctgctcaccaagatcgttagacctaccaatctgcactacggcaaggcataagtctaagttgattgctgacttccgagctgtttaccgttcgttccctgacgtcttccggtcttgggatcctgatagtatcacggcgctcgcgaaaaccaataagagggtggttcgtcagaccctgttcctgacgagcaactacttccataacttgatgcttgttcatgcttccgagagccctgatgttcctgtcaatgttcgtggtacactggaggcagcgcacgacgccattacagctttcttccttcttttcacccttcttgagatagaagcacgtgtttggtgggtgttcaaccaccgagctttcttggaggcgctgtgtatcggaaatgtcctgaaggaggctgctcgagaaccaggtggtgcagatatgatggcaagagatcctctccttgtcagggcaaaagctgatatcacacgcatgatccaaatcatgcaggttatgggcgaagactctgaggtagcgaggactcgagtgcaggttttgagtgactttctggcatga

SEQ ID NO: 324 - DNA, 1581 bp, Fusarium oxysporum
  source 1..1581: mol_type = genomic DNA
atggctcatcatcaagcgcggacgatggctatggatccgccacatatcaccgaatttgcttctgagcgttacttcgaaaagttaagccagctcaatgcacaccaacatcagcgtcaacctcctccgactcgagataatcttgatgcttccacctcgtcgccttcgagatttattcttcctctacgagaaacgaaaactgccgatgttgaacctctaaggccccttgaccagaagcgtgataaatcaaggtttttcggccttcgctcaaaggtctcgatcctccactctaaatcgagtgtcgcgtctggtcatgcgcctcgagtttctgttgagacgccgcaaaaaagtgctagcttcgatcagcttttcctaggacttcccaacgaattacagattcaaatcatttctgccctcccactaaccgacgtcctgaacctccgacttgcctccaaatcgtggcatactctcgtcactttcaacgaaaatactatcgctcgatatcatctcgaacatcatattcccgtttacgcctcccgcctctaccccatcacagacccgagcgagatcaacttccaacatctatgcgggatatggcatcgattacacgtcgctgccaagctcgcctttctaatgtgtgaatggattacaaaagatatctttcttcgccaaactgaagctcaacgacttgcatttgcaccccagaacgagcgcatgcggcgacgcctaatacctcttctatttaccatattccacttcttcgagacgtaccgaaaattgtacctaaagcgtatggctgagaacggaggaaaaggattgagacgggaaccttatactttgaacccgattgaagccgaaatcatgagtatgtacgacgaccaaaccttattaagggttcacgaagtttttccccttgtaatatcatcgttctgtcggagactccgaccaccgacatatgttggtagagtcgagcgatcacttcgtggctatattcgggagaaaccgtccgacgacatgcatgttgccattttgtgcattggtggactgcgacaagtggaaaggctttgggaaatcaagggatacaacagcaggcgtggtgctgttgacacatggtttaatgctctcacgaaagaggcgccacctactgaacagtcaacgtcgaaaccgaaacgaggtcttttcggacgcaaaaagtccactagtgaagctcgatcgtctggtactgcattgaacaaggtccggagttctggctcaatagatgggaacatggattgggaagccaatcttgtcttcaacacgagtttatctgctggggctcccatgtcacctcttacttcgcaacaggctcaggcattactcagcgaccttcccgtactgcaacaaatatggctcacaacagctgaggccctgatccttcagcgtcgggttgtcgagcgtccacaggatatcaaacgcaaccaacaggtcatgctggatttgatcagtgaagatggacttgtagaagaggacgaatggtggtacggccgcagcattcccgattctgtgcggcctcccgtcggtgtcactgatgacgatgcggattaa

SEQ ID NO: 325 - DNA, 723 bp, Fusarium oxysporum
  source 1..723: mol_type = genomic DNA
atggcgtggacgtgcagcggagacactaactcggctcttattgggaacatgtggaagaatggtctcattgccgaccctcgagtgaaagaggcattcctcaaggttgaccgagctcactacgctccagccatgccatatgaagactcaccccagcccatcggctactcagcaactatatctgcaccgcatatgcacgcctcagccatcgagcatgttctcagctaccttcttccctcatcgacatcgccggccccccgggtcctcgatatcggttctggatctgggtatctaacccacgttatggctgaacttgtcggtgagaagggccttgtagtcggtcttgagcatattcgtcagctgaaagaacttggtgaaaagaacatgtcgaaaagtgaggagggaagaagattgcttgagagtggcaaggtgagatttaggtttggtgatgggaggaaggggtgggttgaggaaccgagagagggagagaagaatgaggggacgggctgggatgttattcatgtcggggcttctgcagtggagattcatccagagctattggagcaattgaaggcacctgggtgcatgttcatccccgtcgacgatgacaagatggggtacaaccagcacgtttggagaattgagaaggatggaaatggggagattacgaagaagaagttgtttggagtccgctacgtgccgttgactgaggcaccgaaggcgtag

SEQ ID NO: 326 - DNA, 2790 bp, Magnaporthe oryzae
  source 1..2790: mol_type = genomic DNA
atggcgtatagaggtgctggagggccgggaggcggccgtgactacgatggtcacaacatgcaagacctaaaccctcacagccagtattccaatgtccaattgcctcctgggcacgagcaagaggacgaggcacacaggtcccttttgacccaaggcacaacgctctacgaccacgaccgactcggcgcccacacgcctccagtgcgtccagtctcggcctacagtctcacagagtcctatgccccgaatgctcccaccaccgttcctggctcggccgtcggcgcatctccctcgccatttcagaatgactatggtgtttcgtcgggctaccagggcgcaatgggcggccacgcagacgacggcttccccattggcggcggagacccccagcaaggccacccctacgataccgaggacagctgggtgcagcgccagaaccccaacgccgctccccagggtggtggtctgaaacgttatgccaccaggaaggtcaagctggtgcagggttcagtcctgagcattgactacaacgttcccagtgccatcaggaacgccgtgcagcccaagtaccgcgagcaggagggcaccaacgaggagtttatcaagatgcgatacaccgcggccacctgtgaccccaacgacttcaccctgaagaacggttacgatttgcgtccccgcatgtataacaggcacacggagcttctgatcgccatcacctactacaacgaggacaaggtactgctgtcccgtaccctgcacggtgttatgcagaacattagggacatcgtgaacctgaagaagtcgactttctggaacaaaggcggcccggcttggcagaagattgttgtctgcttggttttcgacggtatcgagaagaccgacaagaacgttctggacgtcctcgccaccattggtatctaccaagatggcgtcgtcaagaaggacgttcacggccaggagactgttgctcatattttcgagtacaccactcagctgtccgtcaccccgagccagcagctcatccgaccccaggacgacggccccaacactctgccgcctgtccagttcatcttctgtctcaaggccaagaatagcaagaagatcaactctcaccgttggcttttcaacgcctttggacggatcctgaaccccgaggtctgtattctgctggatgccggtaccaagcccagctcgaggtcgcttctcggtctctgggagggtttttacaacgacaaggatcttggaggtgcttgcggtgaaattcatgctatgcttggaaagggcggccggaagctgctcaaccccctcgtagctgtgcagaacttcgagtacaagatctccaacattctcgacaagcctctggagagtgcgttcggatacgttagtgtgttgcccggtgctttctccgcataccgcttccgtgccatcatgggacgacccttggagcaatacttccacggtgaccacaccctgtccaagattctgggcaagaagggtatcgagggcatgaacattttcaagaagaacatgttcttggccgaagatcgtattctttgtttcgagcttgttgccaaggccggccagaaatggcacctgagctacatcaaagctgccaagggagagaccgatgttcctgagggtgctgccgagttcatcagccagcgtcgtcgttggttgaacggttcgtttgccgccaccttgtactcactgatgcacttcggaaggatgtacaagagtggtcataacatcatccgcatgttcttcttccacgtccagctcatctacaacatcctcaacgtcatcttcacctggttctctctggcatcttactggcttaccaccaccgtcatcatggatctcgtcggaaacccccaagttggacagaacgctcgcgaaggctggccttttggtaacaccgtcacgccactcttcaacgccgttctcaagtacatttacctggcctttgtcatcctacagtttattctggccttgggtaatagaccgaagggatccaagtacacctacgtcacgtcattctttgtcttctcggtcatccaggcgtatatcctggttttgtctggatacctcgtcgtccaggccttccagacacctatcggcgagcagatcaagaccgacacggccaaggatttcatggatagtatatttggaaagagcggagccgctggtgttattctactcgccttgatcgccatctacggtatttacttcatcgcctcgttcatgtacctggacccctggcacatgttccactccttcccttactacatgctgctcatgtccacctacatcaacattctcatggtgtacgccttcaacaactggcacgatgtttcttggggtaccaaaggatccgacagtaatgaagctctaccctcggccaatattaccaaaggcgagaaggacgaagtcgtcgtggaggaaatcgacaagcctcaagaggatatcgacagtcagttcgaagcaactgtccgtcgtgccctggcacctttcaacgacgaggagaagcccgagcccaaggatctcgaggactcgtacaagtctttccgtacaatgctggttgttctctggctcttctccaactgtctcttggctgttgcgattactagcgataatttcgacgctttgacaaagaaccaaaacacggccaggactgcctctttcttccagttcttgctgttctcgaccgctttcctctctttgatccgtttcatcggattcctctggttcttgggcaagaccggtataatgtgctgcattgcccgtcgctaa

SEQ ID NO: 327 - DNA, 5619 bp, Magnaporthe oryzae
  source 1..5619: mol_type = genomic DNA
atggcacaacaccttccgcctgtcggcggcaacggtggtgcacacacgcagccttcgctacccgcgctgcccgcccatcttcagtccgacacgcacctcacggggcatcttgccagccgattccacgtcagtctgccaaccgccaaactatcttcccacgccttcatctcgatcaacacatacacttcctcgagcaagggacaagatggaggcaaggccggaagcgctcaaggcgaagctgaggatatggccgacagggctttccttcgtctgggccaccgttccgagaaccaagcaattctgttcctaggtgaatctggctcgggaaagacgaccattcgatcgcacatcctgactgcccttctgaacaagacctccacgcccctttctacaaaggtctcactcgccgcatatgtcttcgacaccctaaccactactaagactgcgaccactccgactgcctccaaggcgggtctcttctacgaactccagtacgacacagcatcaacaacgagcccgctgctcatcggtggaaagctgctggatcatcgtctggagagaagtaggattaccgacgtgccaactggcgagcgaaacttccatatcctgtattacattttggccggcacaagtgccgctgaaaaaacccacctgggctttggagagcccgatgctggaaccggaagcaagcgatggaggtatcttgggcacccgacccaactgaaggtcggcatcaacgacgctcaggggttccagctcttcaagactgccctccgcaagcttgaattccctaggagtgaaattgcagagatatgccaagtcctggctagcattcttcacatcggacagctcgagtttgagagctcggaaaacacgacagttgccggcgatgagagcggtggcttctcgcatgagggtggccagatcacaaccgtggcaaagaacaaggacgtgcttgctatagtggccgcatttttgggtgtcagtgccgctgagcttcaaacaacccttggatacaagaccaagatcattcacaaggaaagggtcactgtgatgcttgaccctgctggtgcacgcgccaatgcaaatgaactagcccggactctttactccctccttgtggcctatgtcatcgagaacattaaccaaaagatctgcgctcccgaggaggccattgttaacacagtgtccatcattgacttcccgggattctcgcagcaaagctctactggctcatccctcgatttgctcctcaacaatgctgctgccgaggctatgtacaacttgaccttgcaaaactttttcgatcgcaaggctgatctcctagagaccgaggaagtcagcgtcccacccaccagctactttgacaactccgacgcagtcaagggactgctcaagaccggcaatggtctcttgagcattcttgacgaccaaaccaggcgtcaccgcaccgacatgcagctcctggaaagtctgcgcaagcgcttcgagggcaagaaccctgccatcggcgtcagtgcagccaccgcaaagctaccgggcagcaacttcttgtccgagaatactgctgcttccttcaccgttcgccacttcgctggtgaggttgaatattcgatcaaggggctcgtcgaggagaatggcgaagtcatctctggtgacctcttgaacctggtcaactctaccaagagtgactttattgctcgtctcttcggtcaagaggccctgcacactgttacccatccgcaggagagaaccacggtgatgcaagcttcagtcagttccaagcctatgcgtgccccaagtgtcatgtcgcgcaagatccgaccgggaacggctcgtactactcgccaacgcaaggagtcaatcagtgggcgacaggacaccctagacgatattgccagcgaagccggagattcccggcgccccgtcaacaagccatccgaggaaggcgcttctggtcagttcttacactcgcttgacaacgtgaccaagtctttccatgcacagaacacaaacgcctattttgtcttctgcttgaagccgaatgacaggcgcattgcgaaccagttcgacagcaagtgtgttcgcacacagatgcaaacatttggcattgccgagattagccaacgtatcagatctgcagacttcagtgtgttcttgccctttggagaattcctgggtcttgctgatgttgacactctcctcgtcggaagtgaacgggagaaggtcgaggctgttgttgatgagaagcgctggccgaccaatgagatccaaattggttccacaggtgttttcatcagtgaacgatgctggatggagatcgctcagctcagtgatatggtaaccggccgattcggcgtgcccgaatcggagggcggcacgccactcgccaacatgccctatggcgcttccaaggagcgcctcatagcggctgggaattcgccatacaacaatgacaaggccaagtcgggctactttggcagcaatgacatcgatggcaggtcagacgctggagtttcggcttttggcggaggcgacatgttcaagaatctggatacccgtgagcagatggctgagcgtggtaatgaaaagtccatggttgaggtggaggagttcaaagacagcccgagccgcaagcgctgggttttcattacctggatgctcacatttttcgttcccgagttcctgatacagcatctcggtaaaatgccccgcaaggatgtgcgtatggcatggagagagaagttggccatcaacttcatcatctggttcagttgcttggccgccgctttcatcctggtcgtgttccctatgcttgtttgccctacgcaatatgtgtttaccggcgaagagctctcggcctacaacggaaaagatggcaaggcttcgtatgcagccatccgtggtcaggtctttgatatcggatcgttcatccctaggcaccccctgccctatctgccatcaaagctcttcacccagtacgctggcactgatatcaccggtcttttccctgttcaggtgtctgctctgtgccaaggcacgactggctctgtcaaccctgccgtgctactggattacaaagacaccaacatcaccgactcgcccaacgtttttaacagccaggatctgaattcgcgctatcacgactttcgttacttcaccaacgatacaagacccgactggttctctcagatgatgattacgttccggggcacgtataagaagggcaacatcggctacccggctcaagttgtccagaagatggcccaacaaaggaacgccatcgcaatactcaatggtcgggtgtacgatttcaccaagtacatcgctggaggccgcgatttcagggtcaagtataacgaaacgcgtcctaccgaccagagtctactcgactttatggacccgtcagtcgtgaggcttttctcggaccgtagcggagaggacgtcacgccgctctgggatgcacttaggctggacccgactttacgaaagtcgatgcaactctgtctggataacctgttttaccttggcgatgtcgatacgcgtaactcggtgcgttgcaactttgccaaatacttcatcctggctgttacgatcatcctttgctccatcatcgccttcaagttcttggctgcgcttcagttcggtaccaagaacatgcccgagaacctggacaagttcatcatgtgccagattcctgcctacaccgaagacgaagagtcgctccgtcgcgccattgactctgcagcccgtatgcgctacgatgacaagcgcaaactcttgatcgtcgtttgtgacggtatgattattggtcagggtaacgacaggcccacgccgcgcattgtgctcgatattttgggtgtctcggagacggtcgatccagagcctctcagcttcgaatctctgggtgagggtctcaagcagcacaacatgggcaaggtttactcgggcttgtacgaggttcaaggtcacatcgtccccttcttggtggtcgtcaaggtcggcaagccatccgaggtgtcgcgccccggtaaccgtggcaagcgtgattctcaaatggttatcatgcgcttcctgaaccgtgtccactacaacttggccatgagcccgttggagctcgagatgtaccatcagatccgcaacattattggtgtgaacccgacattctacgaatacatgcttcagatcgatgccgacacggttgttgctgccgattcagcgactcgtttcgtctcagctttcctggatgacacccgcctgattgcatgctgtggagagacgtcgatcgccaacgccaaatcttcattcatcactatgattcaagtttacgagtactatatttcgcacaacttgtccaaggccttcgaatctctgttcggctccgttacttgtttgccaggttgtttctccatgtaccgtatccgcgccgccgagacgggtaagccgctcttcgtctcccgcgaggttgtcgatgcatacgccactatccgcgtcgacacgcttcacatgaagaacctgcttcaccttggtgaggatcgttacctgaccacgcttctgctcaaataccacaacaagtacaagaccaagtacatttaccgagcacatgcttggaccattgcccccgactcatggaaggtcttcctctcacaacgtcgtcgctggatcaactcgacggtgcacaacttgatcgagcttattcccatgggccaactttgcggtttctgctgtttctcgatgcgtttcatcgttttcatcgatttgctctctaccatcattcagcccgtcaccattgcctacattgtttacctcatcgtgcgcatggtcctcactcctgatctggtccccgttctggctttcgtgctgctcgcggcagtttacggccttcaagctatcatcttcatcctccgccgcaagtgggagatgattgcatggatgattctatacattatcgccatgccaattttctcgtttggtctgcccctgtatgccttctggcacatggacgatttcacatggggtaatactcgtgtcgttaccggagagaagggtaagaaggtcgttgtcactgacgagggcaagttcgatccctcatccatccctcgcaagaagtgggaggagtaccagagcgagctgtgggatgcccagacctccaaggatgacaccaggtctgaggcttccggcttctcgtacgccaccaaggcccccgtcgcggtctccgagtatggtttccccgtcaacccctatggcgcataccctcccagccgacctgggagcaccacgggcataccacacatgccacacatgccatactcggccagccgcatgtcattggcccattcggagatgctcatggcgggcaacagacaaagccagttcggtggatcacagttcaacctccctcaatctggcagcgaaatggaactttcaaacctggctggcttgccatcagatgatgccttgcttgccgagattcgggagatcctgagaacggcagatttgatgacggtcaccaagaagggtgtcaagcaagagctcgagcgcaggttcggtgtaaacctcgacagcaggagggcgtacatcaacagcgccaccgaagcactcttgtctggccagctgtag

SEQ ID NO: 328 - DNA, 2487 bp, Magnaporthe oryzae
  source 1..2487: mol_type = genomic DNA
atgggcaatccctttgaaggatggccggtacacgatatcgtttacacggtaatcgtcggcctggtcatgttggctgccgtcctggagtggttcctctgggtggcggccttcatgtattgtcttgttaaggtgtttataaaggcggagcattggacgattcgggctctcgcggttgtggttgccatccttttcgtcggattcagagcggtcttcttgccaatcatggtagtgacactgcccttaccaagcgctattgtgaaactctggccggaagacatggttgtgggactacagtggtttgccttctgggcgttcgccggtctcctgacgatcccatggcttttctgtgtctaccatttcgtcaccaaccagctaggccgagagaagcgtgtcaagcaggtgctggatgaggtctcggccccaaaggttgtcatcgtcatgccttgctacaaggaagacccagaggttttactcgtggccatgaactcaatcgtcgactgcgactacccgccatcttgtatccacgtgttcctgtcctttgacggagaccaagtggacgagctttatctcaacacaatcgaaacggtcggcgtgccgctcaccttggactcgtaccctaagagcatcgacgtcacttacaaggctgcccgtatcaccatctcccgcttcccccacggcggtaagcgtcactgccaaaaggcaacgttcaagctcatcgacaaggtctacaaggaatacctcgagcgcaacgacaatctcttcattctgttcatcgacagtgactgcattctggaccgtgtgtgcctccagaacttcatctacgacatggagctgagccctggaaactcgagggacatgttggccatgactggagtcattacttccacgaccaaaaagcacagtcttattaccgtccttcaagacttggaatacatccacggtcagcttttcgagcgtacggtcgagtctggatgtggtgctgtcacctgtctgcccggagctctcaccatgttgcgtttctctgcgttcaggaggatggccaagtactactttgctgacaaggccgagcagtgtgaggatctcttcgattttgccaagtgccatttaggcgaggaccgctggttgacgcacttgttcatgatcggtgccaagaagcgataccagatccaaatgtgtacctcagccttctgcaagaccgaagccgtgcagaccatgcagtctctggtcaagcagcgccgtcgttggttcttggggtttatcaccaacgaagtttgcatgttgactgactggcgtctatggacgcgttacccgctcttggtgttgatccgcttcatgcagaacaccattcgtaccaccgctcttctcttcttcatcatggttttggctatccttaccacctcgaagcgggtcagtgacctgcctgtcggtttcatcgccatctcgctcggtctcaattggctcatgatgatctactttggcgccaagctccgccgcttcaagatctggctgtaccccctgatgttcgtactcaatcccttcttcaactggtggtacatggtctacggtattttcacggccggtcagcgcacctggggtggacctcgtgccgacgccgccgccgccgacggagacaccaccgcccaacaggccatcgaggcggccgagaaggccggcgatgacctcaatatcgtgcccgagaccttcatcccggcggcgcagatcaagcgcaaggagagcggcaggcggcgcatcgtggccggtggcaacatccagccctcggccaagatcgacggcatgtttgccatccccgagcgtggcgccaacggttggtaccagcacgacaacatctcgctattcacggttgcccacggccacactggccgcgttcctctgcaccctcgtgactcattcgacagtttcttgtctgcgcagacggccctgaactcggtctacatcccgcgccgtgtcgagagtataatgggtgacgaggatcggcgcaagtacgagctcgcccaggccagccagtttaaccagttcctctccaaccagcgccgctcgaccaacggcgagccgccgcagggccaggtgtacgagtatagtgacgtcgacctgcaaaaggccgggtacactgacaacccgctgccgcccacgcctggagagactgcctctgctgttcctgccgccctcaatctgcaccacaaggttggcagcaccgacagcctcgttagtcttgggtcttcagcgtccaacagcaaccaacgggaccgcggaaggcagcgcaccctgatgccaccaacctcctcacaggcccggaccggtaggagtccactcggccgggcgagcttcttgcgcacgtcgacgattgaggacattgagctggagattggcacaagccatggaagcagcgcaaacagacctgcactgagcaggcaagcgtcgaacaacgaccccaacaacagcaacagcggcggccatcagcaacggtag

SEQ ID NO: 329 - DNA, 1158 bp, Phytophthora infestans
  source 1..1158: mol_type = genomic DNA
atggctccgactgtccaaacgtgtgatcctgtactggtgtgcgaccctgtcctcctgtgtgaccgaagtgactccgtgctggcgagcgaccctgttccgccacagaatctctcgttcgtgctcgaaaaggggggagcagtcaagtttgaagatcgtcccgtgcctgaaattaaggacccacatgacgtgatcttgaacgtacgctacacgggaatctgtggtagtgatgtgcactactgcacgcacggctgtatcggcaagtacgtggtggataagcccatggtgctaggccacgagtctgctggcgtcgtccatgccgtgggatccgccgtcaagtctctcaaggtaggtgacgaagtggccatggagccgggtgtgccgtgccgccgttgcgtccgctgtctcgagggaaactacaacttgtgtccggatatggcgttcgcagccacgccgccgtacgacggcacactggccaagttctaccgcatgccggaggacttctgctacaagctgccgtccaccgtcagtatgcaagagggagcgatgctcgaacccacagccgtggccgttcacttctgccgtctggccaaggtgtccccgggtcagaaagtcgtcgtgtttggtgtcggtcccgtgggtctgttgacctgcaaagtggctcgttacgtgttcggagccacaacagtcgtcggcgtggacgtcaatgagaaacgtcttgcggtcgccaaggaacacggcgcgacgcacgtgtatcaggggaagtccggcgtgacaccacaggagtcggccgagcagatcattgccgagtgcggactgggcgacggggccgacgtcgtgattgacgcgagtggagcggagccctgcattcagacggcaatctacgtcgcacgcagcggtggcacgttcacgcagggaggtatgggcaagacagacatcacgttccccattggcatcatgtgcggcaaggagctccgcgtgaccggcagcttccggtactctgcaggcgactaccaactggcgctcgatatggttgcaagtgggcagctgaacgtcaagggtctcatctcgaagattgtgccgttcgaggaagccaaggaggctttcgacaatgtccagcgcggtaacggcatcaagtggctcattgaaggacccaagtga

SEQ ID NO: 330 - DNA, 3907 bp, Fusarium graminearum
  source 1..3907: mol_type = genomic DNA
gatcttcgcttggccttgctccactaagaaggagtttcactagcggcccgcgatagctagcctgatcctagtctttacctcctcaacagtaacaccttctttcaccaccacaagctgagtcttgctcctttgttggaaacagtgaccggattcacacctgacctctggcaatcaataatttttgacccaagtcaggaacttatggctctgtgacagcaaacaagcgctgctgttgctgatttgctttggctgccattcactgacattgattgactggtggcaactaccaacaaacaccttctctcacataaatatacctactacctatctaattcctctccaatttcttccccgtcaactctctttctgcgcatcagcacacggatatcaactaagaatatgagcgacatttatcaacactctttcttgaagttttaaaacacaatatctttacttctttcgctatcaaacacatccttacatacattgacatcctctttggcccattctttgagtacccagacattatctcatcatggcggacagaggtgatcgaggcggccgtggaggccgtggccgtggcggacgcggcggcggctatcaagatggtcgaggaggcggacgaggtggcggagatgggagaggacgaggtgatggtggtttccgtggcggcagaggacgaggtgagggaggacgtggtgacttccgaggcggcttcagtggtcctagaggcggccgtggaggttctgatcgcgggagaggaggatacaggggaggccgaggtggagggcaattctcaaacgagccgtctttcttcaagatcgaatccggtgttcctcagcccgatgctgctattaccaagctcgaggatgaggtggtaaagaatcaaaataattctgttgcccagcttacatcgaaaatgtccaagttgggagtagaagaaaaggagcatttgagcaaattccctccacgacctgcatttggaaacaaaggccgtccagtcactttatgggcaaactattaccagatcgacaccaatattcccatgcttttcaaatacacaatttctgtcaaagagatcgtagctgaatcagaagaaaagaccgacaagcccactgtcgcccagcctaaggggaaagggaaaggaaaaggcaagcccggaaagcctaagaagtccggttctgtcgaagtcaagggacgtaaacttttcttggtcatcaaagagactctaaacgagctcaccaagaaggacaagagcctgcttcttgcgaccgagttcaagtctcagcttatctccttgcgcaagcttgaccttggacttgacaactcatttcgagtaaacctcccgtcatcagcaaaccccgacaagaccgaagtctttgaagtgaccttaaatggccctgaagtagcccgagttgacgagatgctcaagtacgtcaaatcgaataccagtgcttcacatgacgccccaggcaaacttgccgacgacgacgacgatgcagcaaaagccctggcattcccaaaattccctgatgttgttgatgccctgaatgtcatctttgggtttggcccgaggtcgaacgaagacattagtgctgtcggaaactcccgattcttctctttcaagaacggtggtatctgcagggatatgagcatgcgtgggagacccttacaagctgttcgtgggacattccagtctgtccgcctaggtaccggccgacttcttttaaacacaaacatcactgttggcattttcaagatatccggtaactgtgccaagctcttccaggatctcaatgtctttgaagcacagaagtcggaatggcggaaagtgaataacgcgaagttgatgaacaaatttctcccaaaaacccgcgtactggcaacgatgaagtttgccaatgacaagaaagtccaacgacggaaagcaatttacagtctggcctatgcacctgagattgaacgagcctgtcgtggcaacgatcatcctccccggttcacgaagggttatgaataccctggaccaggcaacgtgagcttctacatggtgtctgattctaaagggaccggtgaatatatcactgtcagagaattctacaagcggaaatacaacgacactacgctcaaagactaccctcttcttaatctcggcactgccgcaaacccgaactttaccccagcggagtatgtcgagatcctaccgggacagtcagtcaaggcgaagttgaatagccaagaatcgaccgcgatggtcgattttgcctgtcggtcaccttacgccaatgctttatccattacgaaagatgcgcgggaaactctaggtcttgacgacgagaaattggtgtacaagcccggcaaaagcatacaaaaatggacctatgtcaatgtcaaaccaggaggcaggtctgggccggttccaaagcgcactgtgatggaatttgctcaggtcatgagacaaatgaatattggaatcagcagcaaccctgtagacccttgcacagaggtcatcacccaagaagattacgctcaaggacgttcagatgctttcttcaaatgggcgaagcagaatcgcatagagtttatacttgtgattcttggtacatcagagtccgaaacatacggcaggatcaagacattgggcgactgcacctatggtattcacacctgctgcgcccaggccgaaaagtttggattcaacagaaaccctctgccatatttcgccaactgtgctctcaaatggaacctgaaggcaggtggtgtaaaccacaagctccacaacgagttcggtctcattaaagagggcaaaacgatgttggtaggatatgacgtcacccacccaaccaacatgccttcaggccagggtgatgatgctcccagtttggtcggattggtggccaccattgaccgagatatgggacaatggccagcctactcttgggaacagtcgtccaaacaggagatgttggacgagactttgactgaagcattcaagtcacgacttgcactttggcaaatgcacaaccgacagcagctgcctgagaacatcgttatattccgtgatggcgtgtcggagggccagtttgcccaagttttacaaagagagctaccacgcattcgcattgcctgcaatgccaagtaccccaagaacaagccaccaagaatttctctgatcgtttccgtcaagcgacatcagactcgcttttatcctacttcttccgagagcatgacgtccaagaacaatatcgaaaacggtaccatcgtcgatcgtggtgtcacgcaggctcgatactgggacttctttcttactgcacactccagcatcaaaggcacggctcgccctgcgcactacactgtgttgctggacgaggtcttccgagcgaagtacggagccgaggcagccaatgaattggagagatatgcccacgagctctgctacttgtttggccgagccaccaaggctgtgagcatttgccccccggcatactatgcagacgttgtgtgcactcgagcgagatgttacagacctgagttcttcgaaatcagtgacgttgaaagtgtctcaacagctgggccgggcttaggtgccagtgacccaaagcaggtccatgcggacctcgccaactcgatgtactatatctaagtgtgccgtgtgtgggagatgagttcgctcttttgggctacaaacagagacgagaaatgaagcttttttttttggggggggggttttttttgggaaattggtaggtttctgttaaaggtatgaggtagcgggatatctttgattgtctttcgtttggtttatatcgttttgtcctcatctttgacttaggacagaatagttaggatagcggaaacagcttgcagtcttgtatttggtacttgaagttgcaaggttatacatagcaat

SEQ ID NO: 331 - DNA, 2955 bp, Fusarium graminearum
  source 1..2955: mol_type = genomic DNA
atgtctgatagagggcgctcaccctctccagggggtccctcagggcctgggaggcgaccttcacagtccccagcccgatcggcaactggctctggtagtggacctgctggcggctatgcaaagcccctgggctacgatcctgcgaagcctccaaagcaggaggaccagggaaacacacgaatggaactacctccagatgcgtacatttccgagaccaaaaaggatatgtttactttaagaaacaatcgtttcaacactgagggaaagcctgagcacatcgaggtcaaccagtaccgaatgaccaagttcgacttcaacaagaagatctaccagtacgatgttgtactttcgcctagccctgacaagatcggtccggtcatgaagaagatttgggctcatcctgttaccgtgaagaccatgaagccctacaagcttgagatgtggcttttcgacggtaagaaactggcatggagccccgcgcttgtcgaccgtggtgaacttcggttcagtgtcgatctagacgaaggccaacgtcctcctggagccaagcctcgggatggtggcaagttcctagtcactattcgaaagaccaccgagatccaagttgctgctctgcagggctatctgtctcacaagatgtccttcaataacagtgttcaagaggcactgaacttcattgatcaccttgttcgacagttcccctccaggaacctacttgctatcaagcgaaacttttaccaaactggtcgacctggagctcctcttcaagacggagccatcgttgaggtccacaagggaacctacgcttcaatccgaatgagtgacaacttgaagcaaggtggtgtcggacttggctacaacattgatgtcgccaacacctgtttctggattggcaaccagccattggacaggatggcctgcaactttcttgctaccattgacccaagcaagttccgaggacacactcctgcgactctcaatgagatcctgaagccagtcaggaataggagtggcgggtgggagtcatctgatggcttcaagcaacttcgcaagttgcgacgcctcaaattcaagatcaagcacaagggccgcccaaacgaggacaagctgtacacgatcatggactttgcattcgatgccaagtttggtgaagctggtcacacctcccgcacccacacctttgagaaggatggaaaggacatcagcgtctatgactactacaagaaaatgtacaatgtcaccctgcgactttcccaccttcctcttatcaacgctggaaagggtggcttcattcccatggagcttgccttcgttgagagcatgcaacgatacccattcaagctcaaccccgaccagacagctgcgatgatcaagatcgcggtcacccgccctgccgtacgcaaagccgacatccaaaagggagctgccgctcttcagatcggtcaagatccttatctgagggagtatggtgtcaatttcgaagcccagtttgcgaagaccgaggctcgtatcttgcctccccctactgtcaggtttggccagggcacagcggaacccaagttcgctggtcgctgggacttgcgaggaaagaagttcttcaagcagaacaccgcccccctccagaactggggctttgttgcctgtgaagcacctgtcccacaggctgttctttcagcattcgccacaacattcaagaccactttccttggtcatggcggcaaggtgactggagaccccatgcttctcaatgcacctagcaacctgcgttttgaacccggaaagctggttgagtgggctcatgaggagatcactcgccgaaaaggctacacacaactcttgttcattgtcgtgtccaagaagaacagtggtacctacgagcgcctcaagaagtctgctgattgcagatacggcattctcagccaggttgtccttggtagccatgtgcagaagaacaatggccaataccactccaacgtttgcatgaaggtgaacgccaagcttggtggtgccactgcctgcacgcctcctctgtggaagactcccacattcttccccgacagccgcccaaccatcattgtaggttgcgatgtctcccacgctgctcccggtggtgcgactgcttcagttgcttccatgaccatgtctgtggaccccaatgccactcgatacgccgcagtcgctcagacaaatggatatcgcgtcgagatgcttacccccagcaacattcgactcatgtttgcagaacttcttcctcagtggcgacacaaccacccaggaaagatacctgctcatctgatctacatgcgagatggagttagtgaaggccagttcgctcatgtattggagcaggaggtatccgaaatcaagaaattctttggaggcagcctcccccccgacaagattcccaagatgacagtcatcatcgctacgaagcgtcaccatgtacgcttctttccacagaggggtgacaagaacggaaatcccttgcccggtactctggttgagaaggaagttacccaccctttcatgtttgacttctacctcaactcccatgttgctatccagggaactgcacgccccgtgcactactcagtgattctggatgagatggctatgccagtgaatgatctgcagaagatgatttaccagcagtgctattcctacgcccgctcaaccacccccgtctcccttcacccggcggtctactacgcgcatctcgctagcaaccgagctcgtgcacacgagaacgtcgcaaccagtgatggatttagaaccggtgccaaggggcatgagattattcgggagaagcaagcccatggcatcacctcggacgctcctaacaggaccgctgatgcaccccccctgatccgtctaggaggcccttgtggacagactcctgctgatggcgagaagcgccaacgagattttttccgcagtaccatgtggtacatctaa

SEQ ID NO: 332 - DNA, 1494 bp, Fusarium graminearum
  source 1..1494: mol_type = genomic DNA
atgtcggacctacaaagccgcttggagaagctgcaggagcttttgggcaacggcgtgaagcttgctgaaacgccacacgaagacaacacaacagatggttccgctgcaaatggccttgggaatagcttcggaatggtgatggatgatgagtacatccggaacgaggagcggcttgcagctagagagcaggcctcccaggaacagctgcgagccgatgctgatgccgccagacaaggcctgctcaaaggtaataaggaaaaagccttcgacaacgctgcttttcgcatcggccagcccgttcacaaggactttgctttctgtccgtttaaggtcgtcgtgtcgtatcccgaacgtttcatcggcaaggccaacaagcctcgtgtgaagccatttttcactgaaattctcaagggccgaacttgggactttttctatcttcatgacccgattgagccagccagagacccgtacctcttgattccatccgcccagttcgaggttttcctcgaagaaatcaatctcaaactgaacactttcctcagaatccctgtttgtcccatgaacaaggacaagttctacatgaagtttggtgaaggcggcacccctcgtcctcgttacttgagacgatctttggatgcgacctctcttgacatccggccgtggcctgcagtcgaccccgaagacgtcagatccttcgaagctgcctcggcaccgcaaaagctcacctggaggtccaagatgcgaatcgttaagtccggcttcgcaccaaagaggacggcagatccagacaaggctgcgaagaagaagcgtcacagggaccaaatgctgcgcaacacattgggctacttgggtcttgcgggagatccggatggccacgacatcgttttcatctgtgtcgacgttgaagccattgaacgtaagccaaaccctatctctgaagttgggatttctatcctggacacacgggacatcaaaggcgttcaccctaaggatgctggtcgtggttggtggcctatgatcaagactcatcatcttcgagtgcatgagtatgccagtttacgaaactaccaatttgtcaaggggtgccctgactcttttgactttgggaatagcgtattcccttacaaggacgagcttcaagaagtcatcatgagcatctttaacccctatatttcctctcaacgggaacttgtcgtcgttgggcatgatgtgcgacaagacatcacctacttcaacgatataggtatagatctccgagcccttgcaggactgagagagcctatcgacacccagggcatgcaccaagcttggtgcagctcaaccaatggacgaggcctcgtcaccgtactcaacgatctgaacattccaaacaagaatctgcacaacgccggaaatgatgcccactacacgctctgcgccatgctaggaattgcggtggtagaggtcaatgggaacgagcaacagagcaacgaaatgcttaacaaggttgactga

SEQ ID NO: 333 - DNA, 4488 bp, Fusarium graminearum
  source 1..4488: mol_type = genomic DNA
atggacaccgactcgaccgacagcgaagatgatcgcgttcagtatcgcctgaccgtgaggccttcgaagcatcgaaagaatacagagaagaagcgcctgaacaagcaggttttgaaacaatacatgatagaacacgacagagaagcctatgccaaagattctgagaaaaagaagcgcggccccttcgctgaagcttccaccgacattacaccgcgagaatatcagatagaactcttcgaagccgccaaggagaagaatctcattgtggttttacctacaggcacaggttctggtaaaacactcatctccatcttattgctaaaatactacattcgaatcgaagtggaatctcgcgctcttggaaatccgaggaaggtggcctttttcttggtggaaaaagtagccctctgtgagcagcaataccgatttcttaaggaccagattttcggccacaacattgtcatgttcacaggcgataaccgcggcgtgaccaaggacaagaagtactgggatgatcagttttcctcaaacaaggttgtggtctgcactgctcacattttgctcgactgtctgaacaacggcttcattacaatggaccagatcaacctcctcatcttcgacgaagcccatcatgcaaagaagaagcatgattacgcgcaaattgtccgacgatattattattctaccgaaaagaacaagagacctcgcattctaggaatgaccgcttcccctgtggattccaaggctggagatgttgcagaactggcacttgaacttgagaaaacccttgacagcgagatcgcaacactctccgacaagatgatgcgacaggcgactgatttccaagttcatgttgaagagacagtcaaatacaacacacttggactaccagacgagaccaagacacagctttgggactcgatctctaagctagtatcgcgaaacaaggaattcaaggcgtctctcgacttcacaaaagaggcctccacaatcctaggaccctggtgtgcggaccgatactggcaagtcttgatcgacgatacagagatcaagcgactcgccgacaggactcgcatggcttttttcgggggtggagagaagttgttggcaagaggagaccaagcagaagaggctgtcagggaggttcaaaaggtcgtcgcagcccacgagtttagggcgatcagtcctcaatcgcaggaattgtcagctaaagtgaaatgtctacatgaaatcctggttcatgccttcacagtcgataacacaaagcgctgcatcgtttttgttgatcagagacacacagcttgcctcctttcggacctttacgaccaagtttcaatggcaattcccggtatgaatgcttcgtatatgattggtcaacaatctagcagcagcacccttggcaatatgtctctgcgaaagcaatgttcaacgctcaagaactttagggacggcgtgataaactgtctctttgcaacatcagtggcagaggagggaattgacattccgagttgtgatcttgttatccgatttgatctctatacttctgttattcagtatgttcaatccaaagggcgtgcgagacacgaatcttcacggtatatcaccatgctggaagacggcaacatgagacagattcgcagtctgaaacaagcagcgagagatgcaacagcccttcgagagttctgtctaagaatacctgccgatcgaaaacttcaagacgatgtatttgatgaggagacggaaagtcagatcaagcaaatacgttttaacgtgtacaaaatagaatcaacgggcgcacaacttacattcccctcaagcctcgagatactagctcgattcgttgcatccttgggtacagcagagagcagccatagcaaggctgaatatcacgtctacaaggtgggaacatatttcacagccgccgtcaatctaccgtccagttcccccatcgtctcccaaacaggctatccacaacgaagcaagcttctcgcaaaatgctcagcggcttttgaggtttgcaagaagctcatcaatggcaaacacattgatgatcatcttcagcctactttcaagaaacatttccacaaaatgcgcaatgctcgtgtgggaataagccctaacaagaagggtgagcatgacatgcgcctgaggcccaacgtttggagtatccgtggagaatggacacacttcttcccaacaagaattactcttgacagggattgtggagagaaaaacaggtcgttgattcttctttcgcgaagtccacttccaggactaccttcaatccctctattcttcggcaatggacgctcagccatcgttgaagtgacatgttctcaagaacctttacccatcacgaccgaggaagctgggggtttgactgctttcacactcaaaatctttgccgacgttttcagtaaagagtttgaggccacttgcgaccagtttccttaccttcttgcccccttggcaaaagacaccaatctaaacgaaatatcgcgaatcgactgggatactgtcaaccttgtcagagaccatgacagtctcgaatgggagaatgcgcccgacgatttctttttcgacaagcttgttgtagatccatatgatggagggcgcaagcttataatcaaaggcattgacaaatccaagaagccttctgatcctacaccggagggagtgcctgagtcgagaagtcgtgcttataggtctgcggaacaaaacattaagcagtacagcaacagtctgttttccaagtctcgactaacggcccagtggcgagacgatcaaccggttgtcaaagctgagcttctctcattgcgacgcaatctgttggacgagtttcaagtaaacgaggaaatcaacaaggattgcttcgtcattttagaacccctcaacgtgtcacctctgccaattgacgtcgtttccatggcactcaagttcccggcaatcatccacagaatcgattctgctctgatcgctcttgatgcatgcgaactattcgacctctctattccgccagcgctggcactcgaggcaatgaccaaagacagcgacaacactgaggatcatggcaagcaacaaatcaatttccaagctggcatgggttccaactatgaaaggttggaatttcttggagactcgtttctcaaaatggccaccacaatctccatttttgtactcaaacccaagagcaacgaatgtttgtaccatgtagagcgcatgctgctcatctgcaacaacaatctgttcaacacggccgtagattgcaagctcccagagtacatacgatccttggcattcgacaggcgaacttggtaccctgatcttacactcagaaaaggcaaagctttcaaggcaacagcgcgacagcgcttagccgacaaaagtattgcggatgtctgtgaagctctcattggtgctgcatacctctcaagcaaggatgacaatttgaacatggccgtcaaagctgtgtcacagatgtgcaaagcaaagtaccataccatgatggcttacgatgagtactacgcatctttcaaggttccagattggcagaaagccagtccaaacgccaaccagcgtagacttgtgcagaaagtggcagacgctaccgggtaccacttcaagtctgcgccgctgctccagagtgcattcacacacccttcttacgcgtattcagggaacgttccaaactatcaacgcctcgagtttctaggcgatgccctcatcgacatgaccatcgtcgaatatctctatcgcaactttcccctcgcagaccctcagtggttgacggagcacaagatggcaatggcctcgaaccaatttctcggttgtctgtgtgttaagctcaatctgcaccaccatcttctgttcaacacgtcgcagttcatcagcaaaattcgtgactatgtggccgaacttgagttggctgaagagactgcgcgccaagaggcagaagaagacgggactccaatgcgcatggacttttggctcaatgcgacaacgcctccaaaagcgtacgcagattcaatcgaggctcttatgggggccatgtttgtggattctgaattcgactattctgttgttgaggatttctttaccaagttcatcttcccgtactttaaagacatgtctctgtacgatacctttgcaaacaagcatccttacacatttctcaccaagaagatgcaacaggagatcgggtgcatgaaattctgtatgatttcagacacccgcgttcctgatgcagagcgtggcatggaagttatgaaagagtacgacatatattcagcctttcaagtgcacgaaagagtcatcacatgtcacgtatcaaagagtggaaggtacggtaagattgctgctgcaaagggggcactcgagttgttggagccgtatggcggtgatgtggtcgcgatgaagaagctgttgggctgcgactgcgactctgtaacagcagccatggcggagatggaccatggaacagctgtctaa

SEQ ID NO: 334 - DNA, 4356 bp, Fusarium graminearum
  source 1..4356: mol_type = genomic DNA
atgtcctcaagcgataaggtcatggcggacgcctcttccataccagactccgaggtcaaaacaatagcgtcgtcctcggtcgtcgagatctctgctacaggcgagaaggagataacgactcatatacctgtcgcagatacaccaatgtgctcagatgaccaggccaatgtgcaagagcaagacgaagaagttaagcctcagaaagtgacgcccaatccagaggtggtaaatccccgcggttaccagcgagagatgctggaacaaagcatcaaaaggaatgtcatcgttgcaatggacacgggaagtggtaaaactcaagtggccgtgatgcgcatccaacatgaactcgatacatgtgcaccagacaagattatctggttcttaggcaagacagtatcgctatgtgaacagcaatacagcgttgtccaaaggcaaatgccgtcggtatcgatgaaactgctaacggggcaattgaacatcgatgcatggtccgaggacgtctggccccgtatccttaatgggactcgtatcattgtctcgacctttgatatcctgcgagatgctttggaccatgcatttgtcaagatgaacatgctgtcccttatcgtcttcgatgaagttcataattgtgtaaagaatagctctggtcgaaaggttatggtgaatttctatcacgaacacaagaacgccggcatgcccgtgcctgctatcctgggtttaacagccagcccgatacagtcgaagtcaatccacgacgaaatccttgagctcgaggtcaccatggatgctgtatgcatcactccaacaattaaccggaaagaactcctccagcacgtcaacaagcccaatctttcccgagtattgtatgatgtggaagagcatccgactcgaacccccctaatgcagactctgcagtctgagtactcggcgatggacatcacccaggacccaagtattataaaggccaagcaacttatcgctaagggcgagaagactggacctgaaatactaagtatgttgatgaaacacaggaccttctctcagaagcagttaaagtccttatggaacaaaagcaaagacattcttgatgaactcgggccttgggctgctgacaagtacatctccgagttggtcagtctgtttctcaagagaatcgactcgccaatgacgtttaacgagtcctggagcaatgaggataggacctacctcgcaggtcatttgagacagatcgctgccagtccccatcagcccaaactaccagacagacacaacttggccgacaagacgaataaactaatccaggaactacttgcagcggatgaagatgtggtcggcattatattcgtcagatcaagggctgctgccaacgtcctttgtgctcttttgagggagcaccccgagattcgacagcgatatcgagtcggctctgtagtaggatccgcagccaccaagattcgaaagcaaaacatctacgagtatctgcccggcgcgactgccgatacattacgcgatttcaaaacaggcgccatcaaccttttggtctcgactagtgttcttgaagagggtattgatgtcgcagtgtgcaacctcgtcatatgtttcgatgagacaacgacactcaagtcccatatccaacgccgcggacgagctcgcaaacaaaaatcaaagatgatagtacttgctagatcttcatccgacgctcgggaatgggattccctagaaagagacatgaagagtcgttatgagcaggaaaggggagagttggacgctttagagatagaggctcgcactgaagcgacgtcctctttttcttatactgtgaaaaactcaggggctagattggacctcgagaattctcgccagcatctggaacatttttgtaacaaggttttccagcgagattacgttgatccgagacccgtctacattttccacaagaccgaactgggatcagcaccgccgactttcagcgcaacggtgactcttccctcgggtctgcctaagcacctccgaaggtgccaaggtggaggtggatggagatcagaaaagaatgcgatgaaggaagcggcttttcgtgcattcgtcatgctgcaccaagaaggtttggttagcgaccaccttcttcccctaaatgcagattcgaaagaagcagaagaagaggtgcagctaactgcgcccgagcttctatttgacccatggaaagacattgcacagcggtgggagaccacggctgagaaatggctctatgcttacgagttcgccgatcacgagtatgttactcctcttcatttcgagattgccttgcctgtgtgtcttccacgaccccgcgacatcacctttcatcctgaagagggacttaaatggcatgtcaaatgcacctcaatcaagaggatctccaatgatgaatgcttgggcttgccagatcatacgtcaaccctattggcgatgcattatggccaccgctggaacgtggaagatcgtgaccatgtgatcaaattcatatatgagaacaagaatctcacccgagatcaaattggatcggtacccttcggcgaaagcattgatgctctattggaaaagagagtcctggttcgggaccccaaaaatactcccttccactacgtcaaaatgatcccatcaaagcctccaaaagagcaagttcagcacccatttaatgaatacgaggaagcgccagaagaacagtatctagttgtggatcaatggacacgcaggtcggacctgttgcatgagataaaacccggtcaggggaagagctcttgcaccaaaccctaccgctgggttctcccgatttccagagcgactgttgatgaggttcctcggcgtgccgctaagtgcggtatgcttatcccttccatcattcacgaattggaggttcagctcatcgcgaatgaactgtcctcgacacttttggcgccagttggtatcacagatctgcaattggtgattgaagccatcagctcgcgtagcgctgcagagcctgttgactatgaacgtattgaatttttgggcgattcggttttgaagtattgcactgttattcaagcctactctgaacatcccttttggcccgaaggtctactcaaccatttcaaagaccgactagtctccaatacccgtttgactcgcatgtgccttgagacaggcctttccaagttcattttttccaaaacatttactggaatcaagtggagaccgctatatcgagacgaattcctagataagaagccagtcgatggtgtatcaaggtttgttggtccaaagactcttgctgatgtggtcgaggcacttgttggagcctcctaccaggatggaggaatcagcaaagctctggagtgcatcaaggttttcttgggcaccaagtgcaattggcatgatgacaaagtcgccagagacatactcttccgagcagcaattagcgacgtaccgttgccccccacgatggagcctttggaagagctcatcgggtacacatttcagaagaagtctctactcattgaggcaatgactcacgggtcgtatgcggctgatgggcagcagcgatcttatgaacaactcgagtttcttggagatgcggttcttgactacattgtcgtaacccgaatgttccaatctgaccccccagtgcccaatggacgcttacacatggtcaagactgccatggccaacgctgatttccttgcttttacaaacatgcaacatggactacgccggcctgaagttgaaataaatgagaacggcgaaccagtgcctacagaagtttcactgccgatatggaaattcatgcgtcatagctctccagagatgggtagaatcatgaatgagacccaggcccgatttgagagccttcaagaggaaatcaatgaggctaggacgaatggtaaacactacccctggacacttctcgctcgtcttcacccgaagaagttctactccgatattttcgaggctaccctaggtgccatttgggttgattcaggagatatcgaagtatgcacagcctttcttcacaagttcggcgtcttgccgtatcttgaccgaattctcagcgataatattcatgttcaacatcctaaagaggaactcgccaaactagcaatcgaccagaaaatgacgtatgattatacggctgttgatgggcctataaaggagtacctctgcacggccaaggttggagatcgcgtcgtgggagtcgtgtcaggggcactcaataaggctgaggcaatgaccaaggctgccgaagagggcgtgaattttttgaatggggagcagaaacgtgcagagaaggcggctcaggatgaaatggcgcgatttcttgttgccatggaactcatttag

SEQ ID NO: 335 - DNA, 156 bp, Verticillium nonalfalfae
  source 1..156: mol_type = genomic DNA
tcatgaccacagtcatgagttctcaccgaatgaagacccagggtcactgatcgactggagccatctgctgtcgaccaaagaggttgagtacttgccttgggatgaagatcacagtcccagcttctatcaaagcaagtttgtgattgatccatacac

SEQ ID NO: 336 - DNA, 156 bp, Verticillium nonalfalfae
  source 1..156: mol_type = genomic DNA
agaaggtcaacgatctactgccacaggcgacaaacaagaagccatatgctagggtttatccggcaccgtgggcgaaagtcgacacgattccattagatcatgcttactttggggcgttgatccctttcatttcacacattgtcgaggttcgactgg

SEQ ID NO: 337 - DNA, 2877 bp, Verticillium nonalfalfae
  source 1..2877: mol_type = genomic DNA
atgcccggcatcgctcgcaaggtcgtcatttgcgcggcgatcgacggcctcatcgtacagcctctgtcctccaaagggcagcgccctgcgcagcccgtccgcattggatatggtgacggtgccatttccccagcgccgcgggatcaactccctgatctcaccaagcccaacgcctcgttcgaggcttttggtgttgtgggcctgattaccctttcaaaactgaatttcctcattacaattacccgtcgacaccaggtcgctcaaattctaggatttcctatctacgttgtcaccgaggttgcgattacaccatgcgcctctcgccaggaagccgaggatgccgttcttcggacctccgtgcagctgcagacccgtactgatgatacggacacagaggattcggacagcgatagtaccatcgagttaatggcccacgctgtcgatgaggtcgacgatcagacgcagtcagagggctccatctcagcaggcgttaagagcaccgtcgccgaagacgtcatgagtcgtaaggggggctatggtcgattcgcccagcgctggttcagcagctccggctggatgcagggccagaaacgcaacgctggctggagctacacgacgaccgagttgcctcgagcttcgatggaccagcgcccggacctggagcccccggcggcatcgaaggtgcctctggaagaagaggacgacagagtcaacgaagcaaaggcgtcttctctgcttcccaaattgctccgaactgcgcaaattctttacgggtcatctaggagcttcttcttctcgtacgacgtagacataaccaggcactgggcgactcgagcacaatctccatctggtgagctgccactataccgtcgcgtcgaacctacattcttctggaaccgaaatacttctcagccattcattgattccggaaacgatgcgctagttctcccactcatgcagggattcgtcgggcagagggagtttaccatggataagagcccaccgcagcatgacgaagacgcgaataacgcactggaaatgtcaaacatgtctgctccaacatctccgccagggtcgccccctacagaagcgattcgcggctccctggatctccggggctcggaaaagaagttcctgattacggtgatttctcggcggtccattaagagagccggcctccgatatttgcgccgcggtattgatgaggatggccatgtggccaacgctgttgagacggagcaaattctgtctaactcttcgtgggatcagagctctaaaatttactcgttcctgcaaattcgcggcagtatacccctattcttcacccagagcccgtactcattgaaacctgcaccagtcatacaacactccacagaggcaaactttgaagcctctaagaagcacttcgagcgccttcaccgagaatatggtatgctgcaagtggtcagcttggtggaaaaacacaatgttgaggctacaatcggcaacgaataccagcatactgtcgcgaagctaaacgaaaccgtcttcagcgatcatacttctcaagtcccgttcgaatggtttgatttccacgcagcctgtcgtgggatgaagttcgaaaacgtcagcctccttctggatgccatgaggaccaagcttgatgagcttgggagcactgtcgaaaaggatggagagctgttccttcgccaacgtggagtgcttcggacaaattgcatggactgtctcgaccggacaaatgtttgccagagctcatttgcaaagtatatgctggaatcacagctcaaggctgagggatacgatctgagcatgcaagtagaccagcaatctgcatggttcaacacgctgtgggcggacaacggagactccgtgtcgaagcagtacgcttctacggcagccatgaaaggcgactacacacggtacaagactcggaactacagaggaatgctcaatgatcttggcttctcattgacaagattttataacggcatggttaatgactatttcagtcaagctgccattgacttcctccttggcaacgtcacttccatggtctttcaagagttcgaagctgaaatgatgacgaaagatcccgccatgtcgatgctcaagatgcgtgaatcagctatcgaattatgccagaaacgcgtcatctcagaccaaaaagaggactttgttggcggatgggtcatgctgagccctccaacgtctgacgttgtcaagtcacagacacccttcgaagaagtgattctccttctcacagatgctgccctttatctctgtcgctttgactggaagcttgacaaggtatcgtcgttcgaacgcgtcgacctcgcgcatatcgtgggtatccgcttcggcacttatattacatccacagtttcgcctggtcacaccgacgagagtaaaaacattgggttcgtggtgtcataccagcctggaaagactgacatccaacgcacaaatactcgtacgctttcgagcaactttatcaaacaacctggtcaggtcgaagaagagtcattggccgcggtggcggtcgacgagcctgcggcgctctcggggctgatgggactgctgtccggtcatcgacccaaaccccaaacaccgactcgaaagctcgccttcaaggcgccgtattcgcagtcgtcggccgcggtgacgggtgaggggccacgcttgagcgagacacagcaggttgtgagtatctgtgctgatgtcgagagactggccttcaaagcgcagcctggaaaggacgtgcctggaaccaagagcatcatcgagaggggtgacatcatctcattggaggacgcacaagcaaacacgacgattttagaccagctgagccactctatcaagaggcttgtttgggcgtag

SEQ ID NO: 338 - DNA, 4014 bp, Verticillium dahliae
  source 1..4014: mol_type = genomic DNA
atgtcagatctagcagtcggtcagatcgtccagctgaccgacggccgcaatggcgtcgtacgcttcgccggcaccacccatttcgcctcgggcgaatgggtcggcattgaattggaggatgactctggaaagaacgacggcagcgtccagggcgagcgctactttgactgttccatggggcgaggcatgtttgtgcggccgtcgaccctgaccattctcgcccaggctccagctccagctgcggcgccggccgccagacctaccgtcaggaagacgagcaggcccagcagcttcgtgcccggcacgggcagggtgtcgagcgtcaccgacccgagcatggccaagcggatgagtctgaatgctgctagtcccagcccggccccgcgcacatctcgacctgcgagccttgtacggtctcctacgaagtcgccaacgaagcaaattggttcgaccacctccagcaccgcaccctcccggaccggcacaccttcaaacgccaaaggcaccaccgccacgcgaactcgcccggcagtaggtgttcgcacctccatgggaccccctccgattccctccgcacgagtgagccgacagccatcaacatcgtcagcgacaggtcgccctcccgccaggccgctttccaatcgactctccctgtccggctcgcgcagcgtgcccaagccagaccccctccgacgcccatcgaccgattcgcaagcaggcagggagcccggctcggcagcagacagcggcgacgacggcaggagcagctcgccatctaagggagcggctgatctggcctcaccgcatgccacgagcccggtgcaagctcggaccaacgcgctcgagcggttgacctcgggcaggacggcgaccacgacggcacggtcgccagccacggcgtcgcctcgaacggccggcggcaacacggctgcggcgcgggagaacgaagacctcaaggcgaagctccgtgtcatggagcgcaagaggctggaagaccgggagaagctgaagcagctggagaagctccaaggcgaacgcgacaagtttgagtcgatcatccagaagctgcagacaaagtaccaaccccagcaaacggagaatgcagagctccgcaagcagatcaaggaggccgagacgcggttcgaggccgtggagcagatgcaggccgagcatgagacggccttggagctggccacgctggaccgtgagatggcggaagagacggccgaagtgctcaaggccgagctcgaagcgttgaagcagaaatcagaggagcttgagctcgaggtggaaatcttgcgagaggagaacgaggagtttagccagggcatgacgcccgaagagcggtcaagcacgggctggctgcagatggagaggacgaacgagcggttgagggaagcactgatacgattgcgcgacctgacccaggctcaagaggccgagcttcgagaccagatcaaggccctggagtctgacctgcaagactacagtaccgtgcaggagcagttcgcggcctccaaggaaaagctggcacagtctgaaagcgcggtcgaggatcttcgccaacagctcgacaatgctcttggagcggaggacatgattgaggacctcaccgagcgcaacatgagcatggccgaagagattgaggagctcaaggccgtcatcgaggatctcgaaaacctcaaggagatcaatgatgagctcgagattaatcacgtacaaaacgagaaggagatgcaggaggaactcgacttcaaggacagcgtcattgcggaacaggcccgacgagccggtcagcaagaggaagccctcgaagacatggagtacaccctttcgaggttcagggaactcgtcacgagcctgcagggcgaccttgaggacatgcgcgcatcgcacgctgtcaccgaggccgagtcggagcaattagacagcaagtcccgcgccatgatggacctcaacatgaagctccagatctcggctgccaagacacaggtcaagacgatcgacctggagcttcgccgtctggaggcgcaagaagcggagcagcacctcgaaatcgtcaagctcttcttgcccgagacctaccaggaggaccgcgactccgtgttggcgctccttcgcttcaagcgactggcgttcaaggccactctgctccagggcttcctcaaggaacgcgtcacgggccagccgcaccccggccacgaggacgacatgtttgccggctgcgatgccattgacaagctcacctgggtggcggccatgtgcggccgcttcatcaacgccatcagccactgctcgatcgagcagttccagcactaccagggcgctctgtttgagctggagccggtggagcgggcggtgaacgggtggatcgacggcctcaggagggatgaactcaaggaggccaagtgcgccagcgagctgcagcgctccattgcgctcatgacccatctcgccgaggttcaccttacggacgatctgcagagcttcgccgacgccatgcacatgcgcgctctcgtcgtgcaaagccatctggattcggccgccgcggccattacgaccgccagggccatggtccagagagtcatccccgagtctggcgaggacgacgagatggcacagcacttcagcaagaaggccgagcacgttgtcggccagacccgcagcaccaaggtcattgccagcaaggccgtgcgcgccctcgaggatctcaagaaccgatctctctcgctggctcgggacgacagcacgcaagaggcgtttgagcagtgcgaagaggccgcaaaggacctcgccgcactggcgcggcagattggcctcgacttgcacaagctgctgcacgaggagggcaggaccgagccatacacgcacacggaggtgcagaacacgatggcgcagacggccctgtcggccggttcgtcgaccgactcggatctcttctcgacctacgtgaccaagctccgggtcgtcacgcagcagatcacggaccttgcgggcctcagctctgacctgacgcagacgcaagagtttgagctcaacccggccccctggaagctccgctctcaagaactcaaggctctcaagacgatccccgtggatgccgaagaggagctccgccgcgtcaaggaggagcacaacgaggcgcgccgcacgattgcgcagcgcgacgagagcctcagcacggcgacgctcaagattgagacgctcgagtcccgcatgcgcgacgcgcaccaaaaggcgtcgcgcatcgccgaccttgaggcccagatcgagacggccaagcagcgcgcggcggcgctcaaggaggacattgaaaagggcgaccgcgagctcaaggcgctcgaggcggaccgcgaccagtggaagaagattgcgggcgacagcaaggcgttcgccggcgccaacgacgctggcgccgccaagtcgggccaggaacgggccgtggcgacggcgcgcgagatggacgccctcaaggccgacattgcgcacctgcaggcggcggtgcggtacctgcgcgaggacaaccggcgggcgcggctcacggagcaggccgactacgactggctcgcggcgccgctgcgcaaggcggcgtcgccggccgagcagcggcgcgcgctcgtcgtggccgagggccgcgacgcgctcggcgagctcgtgcggttcgcgacccaggccaaggtgtacgacctccaggacctgccgcaggacaagctcgcgtggcggccggccaagagcacgccgcagtaccacgccgcgcggcaggcggaggacctcgcggcctggaagggctggcgcgactcggtggtgcagaagacggaggtcgtcgccgggcgcaggggcggtggtgctccggacatgaagagggtcgaggcgctgcggcggagcgcggcggctgcgcgactgcagattcggctgccggggcccgacggcaagatggcgcggggcagcggacgggatgtgcagattgtcggatcgagggagtgggagggtctgcaggggcggttggccgtgtaa

SEQ ID NO: 339 - DNA, 1089 bp, Rhizoctonia solani
  source 1..1089: mol_type = genomic DNA
atgcgctccactgctactactttctcccttctctctttggctcctgccctgtttgcatccccagttgagcgttgtacaggtaccatatcatctttagatgatgttgccaatgcaatcaaatgtactactatcaatatcaactcgttcacagtacccgctggaaagactttccaactggatgcccccagtggcgctacagtcaacctattgggagacgttacgtttggcgtctctgcatgggcgggaccactattccaattgaccggaacaagcatcactttcaacggcaatggacataccttcaacggccaaggcgaacaatactgggacggtcttggaagcagtggaacgactaagcctcaccccatgatgaaaatcaaatcgtccggaacgttctcgaacgttgtagttaaaaactccccacagcaatgctttagcttcggcaacagcgcagctctgactgtttccaaggtcacagtcgacaattctgcaggagatgctgcgaacagcaagagtggtggtaaagctgctggtcataacacggacgggtttgatgtctcggtttccaatctcactatcgaagactccaccgtgcacaatcaagatgattgtctcgcaattaataaaggctccaacattattttccagcgtaacacatgcaccggtggacatgggatctcggtgggctctatcgactcggatgtcacagtcagtggcgtacagatccttaataatgtggtcacgaacaacgacaatggtcttcgcatcaagaccaaggctgctgccactggctccactgtatctggcattacctacaccggcaacaccgtcactggttgcaaaaagtacggtgtcatcattgaccagagttacccagatacccttggtactcctgggactggcgtcaaaatttctggcgtgaccttcagtggtaccaacaccgtttccgtcgttagtggagccaaggaggtcgaagtcaactgcggctcaggttcttgcacaggaacttggaattggtcgggtctcaaggtttctggtggatccgcgggggccatcaattactctggtatcaccggtttctcgctttaa

SEQ ID NO: 340 - DNA, 169 bp, Botrytis cinerea
  source 1..169: mol_type = genomic DNA
ttcgttccaggagttacacgcaaagatcacttcactggtggaccagcaaaaagatagtaaacatatcgggaaaatatcgatatatattctccgaattctacgagatatcagagcagaattacctagtaaccctgcactacaaaagtttggactctcacttgtctcatca

SEQ ID NO: 341 - DNA, 179 bp, Botrytis cinerea
  source 1..179: mol_type = genomic DNA
ttcgtgctctcgtcgaaagcaaagacaataaagaagaacaaatggagcgcgagttggagggattgcgaagaggaagtgttagcaatcctactacgcatcgtactagtgccatgagcagcggaactgtgactcaggataggaattctctccaagacaataagagcacagttgtaagctgg

SEQ ID NO: 342 - DNA, 168 bp, Botrytis cinerea
  source 1..168: mol_type = genomic DNA
acgttgttcaaagtgcagtggcaaagcgagcacttgaaatgcagttaaagaatgagggactagatgtcactctacaaattgatcaaactcaacaatggttcaatactttgtgggccgacaatggtgacgccatttctaagcaatacgcttctacagcagcattgaagg

SEQ ID NO: 343 - DNA, 259 bp, Sclerotinia sclerotiorum; identical to SEQ ID NO: 312
  source 1..259: mol_type = genomic DNA

SEQ ID NO: 344 - DNA, 200 bp, Sclerotinia sclerotiorum; identical to SEQ ID NO: 313
  source 1..200: mol_type = genomic DNA

SEQ ID NO: 345 - DNA, 230 bp, Sclerotinia sclerotiorum
  source 1..230: mol_type = genomic DNA
gcattggctgcgctgaagacgaaacctttattgaaagatgaaagtattcgagatttggagggattgagattagatgtatgtgagcggtggtttggtgatgaaattctttactttacaccttatgttcgacacgatgatttggaaggatcattagccgttgagacattaagaggttgggcgaagaaagcatcagaggtactactggaaggattcacaaagactcttcaagg

SEQ ID NO: 346 - DNA, 196 bp, Sclerotinia sclerotiorum
  source 1..196: mol_type = genomic DNA
tcaatgccagagattgacggttactcttcagcagcggaggatttctgtgaattgtgcgaggcatcaggtcatgatgttctacattgccccatgttcggtcctaatggtaatagtggcaactctagagaggagtctcctaaagagcaacgaacaggaaaagacgttgtcatggaaggactcaaactatcacccaaac

SEQ ID NO: 347 - DNA, 194 bp, Sclerotinia sclerotiorum
  source 1..194: mol_type = genomic DNA
gcttacatttccaagcaggaaatcaatggccgcttgactgaaataatcattaacaataccgctgtaaaatctagagatagaaagtcccatgtctgtcaaagcacccttgtaatcacgctttctagtacgagtgaagtctcccttcagggctgctgtagaggcatattgcttagagatagcatcgccattatcag

SEQ ID NO: 348 - DNA, 753 bp, Fusarium oxysporum
  source 1..753: mol_type = genomic DNA
atggagacggatatgcaccgagtcatccgcacccaggacctttctgacgaccactgccagtacttcatctaccagaccctccgcgccctcaaggccatgcactcagccaacgtgctgcaccgagacttgaagccctccaacctcctcctcaacgccaactgtgatctcaaggtttgcgattttggtcttgcgcgatccgctgcttcccaggaggacaactccggtttcatgactgaatacgtcgcgactcgatggtaccgtgcgcccgagatcatgttgactttcaaggagtacaccaaggctattgatgtgtggtcggttggctgcattctcgccgagatgctcagcggcaagcctcttttccctggcaaggactaccaccaccagttgacactcattctggatgtgctgggcacgccgactatggaggattactacggaatcaagtcgcgccgcgctagagaatacattcgatcgctccccttcaagaagaaggttcccttccgaactctattccccaagacctcggatctggccctcgacctgctcgagaagctcctcgcattcaaccctgttaagcgcattaccgtggaggaagctctgaagcacccataccttgagccttaccacgatcccgaggatgagccaacagcgcccccgatccctgaggagttctttgactttgacaagcacaaagacaacctgagcaaggagcagctgaagcagttgatctaccaggagattatgaggtaa

SEQ ID NO: 349 - DNA, 1074 bp, Fusarium oxysporum
  source 1..1074: mol_type = genomic DNA
atggccgagttcgtacgcgcccagatctttggcaccacattcgagatcacctcgagatactccgatctccagcctgttggcatgggagcttttggcctcgtttgctctgcccgggatcaacttaccaaccaaaatgtcgcagtcaagaagatcatgaagcctttcagcacacctgtgctcgcaaagcgcacataccgtgagctcaagctgctcaagcacctcaagcacgaaaacgtcatttctctcagcgacatctttatttctcctttggaagatatctattttgtcacagagctcctcggtaccgatcttcaccgattattgacatcgcgccctcttgagaagcagttcatccagtacttcctctaccaaattatgcgaggtctgaagtacgtgcattcggccggcgttgtccaccgcgatctcaaacccagcaatatcctcgtcaacgaaaactgtgatctcaagatttgcgactttggtcttgcacgaatccaggaccctcagatgactggttatgtctccacacgatactaccgagcccctgaaattatgctcacctggcaaaaatacgacgtcgaggttgatatttggagtgccggttgcatttttgctgagatgcttgagggcaaacctttgttccccggaaaagatcacgtcaaccaattctctatcatcactgagctacttggtacccctcctgatgatgttatcaacaccatcgccagcgagaacacactgcggttcgtgaagtcgctgcccaaacgcgagcgacagcctcttcgtaacaagttcaagaatgccgacgattcggctattgatctgctggagcgcatgcttgtcttcgaccctaagaagcgaataactgccacagaggccctgtcccacgactatctctctccctaccacgaccccacagacgagcccgtggcggaggagaagtttgactggagcttcaacgacgccgatctccccgttgatacatggaaaatcatgatgtactcggaaattctcgattatcataacgtggaagccggagttactaacatggaggagcaattcaacggacaataa

SEQ ID NO: 350 - DNA, 1965 bp, Fusarium oxysporum
  source 1..1965: mol_type = genomic DNA
atgtctgcctccgactcgatcccggcccccccggaggactggaaggatctgtcgacacctgcatctccaggctctgaagattcgtcagaacccagtacgccgctcgaatctcccggtcatgatagccccagtgagcctcctcgaagagtaccatctctgcgctccgtttccgatcctcgcaacatgaatccgaactcaactgctatgggtgttttaggcatggccagacgccctgtacaaacatcctcgagttttgctggaagtagtagtgcctcggtggaaaacagtataatggccaaagcccgagcattacatcaacaacgcatgcagaagggcatgtctcccgctggaatccccggaacaccctcggggtcatcacctacggccagcgtcgctaacggattccctaccaatctgggattgccgcccaatatgcaacgaccgcacgcaccacatgtaaattcagctcctgcgataacgaagccctcgctgagtgagagaagggccatgggcggcggcatgggcatgaagctgtctgatatgggtagacccagccctgtcaccgccactgggaagaaacgggggcctcctggaaagctttctgatatcacaggtgatgcgccaggtagtcaacaatccaacggaacagggggtgggcaggggtcaaaaatggacgatttcaagaaatatattgacacagagaagggttgggtgacctttgatggcgctgccacaatcacacggacaggtgtcaactttgccaatggccaaaccttcagcatatctcttgatgaagttgaagtcttgaccgagctgggtaaaggaaactacggaacagtctacaaggtcaagcatgccaagcgaagagtccctcgcttcggacaaggcctctcgagaaagccccttcctgttcagtattcgcagtcggacccttctcccattggatctgcggaagactccgccgagggcttgccagacacgaccgacggtacaacgggcacagtaatggcgatgaaagaaatgcgcctggagctcgacgacgccaaattcacaaccattctgaaggagctcgtcatcttacacgagtgtgtttctccgtatatcatcgacttttacggcgccttcttccaggaaggtgctgtttacatgtgtattgagtatatggatggcggatctatcgataagctgtataatggtggtatcccggagaatgttcttcgaaaaatcacatactctaccgtgatgggtctcaaatcactgaaggaggagcatagcattattcatcgcgatgtcaaaccaacaaacatcttggtcaatacacgaggccaggtcaagatttgcgattttggtgtcagtggtaatctggtagctagtatagcgcgaaccaacatcggctgtcagagctatatggcccccgagagaatctctggtggtggattcgcacaagccggtaattccgatggctcatacagcgttcagagcgatgtctggagtttgggcctgaccatcatcgagtgtgctaagggcgcttatccttacccaccggaggtctcttctactattttcagccaactgagtgctattgttgaaggtgaaccacctgctatgccagaggacacttactcggacatggccaaggattttgtgaaaagctgtcttcacaagattcctatgaagcggccaacctacgccatgctattgaaacatccgtggctcgtcgaatttacaaagcctcaaacaatcacggaagaagctgaggagggtgatggagttgatacggtcgcggaagctgttggtaaaattgatttgagctcatcaactgcagatactgaagtggcagattgggtcaatggcgttctacaacgagagaaagatggcctgaaggaggacgggcccttgaaaccagcactacacaatgcaccgcttgatagcgtcagtcctatgtcaagcccaaaggatgcatga

SEQ ID NO: 351 - DNA, 108 bp, Medicago truncatula
  source 1..108: mol_type = genomic DNA
gcnttyathcarytnwsnaarccntgyathwsngayaargartgywsnathgtnaaraaytaymgngcnmgntgymgnaarggntaytgygtnmgnmgnmgnathmgn

SEQ ID NO: 352 - DNA, 120 bp, Fagopyrum esculentum
  source 1..120: mol_type = genomic DNA
gcncartgyggngcncarggnggnggngcnacntgyccnggnggnytntgytgywsncartggggntggtgyggnwsnacnccnaartaytgyggngcnggntgycarwsnaaytgyaar

SEQ ID NO: 353 - DNA, 120 bp, Fagopyrum esculentum
  source 1..120: mol_type = genomic DNA
gcncartgyggngcncarggnggnggngcnacntgyccnggnggnytntgytgywsncartggggntggtgyggnwsnacnccnaartaytgyggngcnggntgycarwsnaaytgymgn

SEQ ID NO: 354 - DNA, 558 bp, Capsicum annuum
  source 1..558: mol_type = genomic DNA
atgatgaaygcnaayggnttywsnggngtngaraargartayathmgnaarcaycayytncaycarccnaargaraaycartgywsnwsnttyytngtnaarcayathmgngcnccngtncayytngtntggwsnytngtnmgnmgnttygaycarccncaraartayaarccnttygtnwsnmgntgyathgcncarggngayytngarathggnwsnytnmgngargtngaygtnaarwsnggnytnccngcnacnacnwsnacngarmgnytngarytnytngaygaygargarcayathytnwsnttymgnathathggnggngaycaymgnytnmgnaaytaywsnwsnathathwsnytncayccngargtnathgayggnmgnccnggnacnytngtnathgarwsnttygtngtngaygtnccncarggnaayacnaargaygaracntgytayttygtngargcnytnathaaytgyaayytnaarwsnytngcngaygtnwsngarmgnytngcngtncargaymgnacngarccnathgaycargtn

SEQ ID NO: 355 - DNA, 981 bp, Phaseolus vulgaris
  source 1..981: mol_type = genomic DNA
atgaaraaraaymgnatgatgathatgathtgywsngtnggngtngtntggatgytnytngtnggnggnwsntayggngarcartgyggnmgncargcnggnggngcnytntgyccnggnggnaaytgytgywsncarttyggntggtgyggnwsnacnacngaytaytgyggnaargaytgycarwsncartgyggnggnccnwsnccngcnccnacngayytnwsngcnytnathwsnmgnwsnacnttygaycargtnytnaarcaymgnaaygayggngcntgyccngcnaarggnttytayacntaygaygcnttyathgcngcngcnaargcntayccnwsnttyggnaayacnggngayacngcnacnmgnaarmgngarathgcngcnttyytnggncaracnwsncaygaracnacnggnggntgggcnacngcnccngayggnccntaygcntggggntaytgyttygtnmgngarmgnaayccnwsngcntaytgywsngcnacnccncarttyccntgygcnccnggncarcartaytayggnmgnggnccnathcarathwsntggaaytayaaytayggncartgyggnmgngcnathggngtngayytnytnaayaarccngayytngtngcnacngaywsngtnathwsnttyaarwsngcnytntggttytggatgacngcncarwsnccnaarccnwsnwsncaygaygtnathacnwsnmgntggacnccnwsnwsngcngaygtngcngcnmgnmgnytnccnggntayggnacngtnacnaayathathaayggnggnytngartgyggnmgnggncargaywsnmgngtncargaymgnathggnttyttyaarmgntaytgygayytnytnggngtnggntayggnaayaayytngaytgytaywsncaracnccnttyggnaaywsnytnttyytnwsngayytngtnacnwsncar

SEQ ID NO: 356 - DNA, 1020 bp, Oryza sativa
  source 1..1020: mol_type = genomic DNA
atgwsnacnccnmgngcngcngcnwsnytngcnaaraargcngcnytngtngcnytngcngtnytngcngcngcnytngcnacngcngcnmgngcngarcartgyggngcncargcnggnggngcnmgntgyccnaaytgyytntgytgywsnmgntggggntggtgyggnacnacnwsngayttytgyggngayggntgycarwsncartgywsnggntgyggnccnacnccnacnccnacnccnccnwsnccnwsngayggngtnggnwsnathgtnccnmgngayytnttygarmgnytnytnytncaymgnaaygayggngcntgyccngcnmgnggnttytayacntaygargcnttyytngcngcngcngcngcnttyccngcnttyggnggnacnggnaayacngaracnmgnaarmgngargtngcngcnttyytnggncaracnwsncaygaracnacnggnggntggccnacngcnccngayggnccnttywsntggggntaytgyttyaarcargarcaraayccnccnwsngaytaytgycarccnwsnccngartggccntgygcnccnggnmgnaartaytayggnmgnggnccnathcarytnwsnttyaayttyaaytayggnccngcnggnmgngcnathggngtngayytnytnwsnaayccngayytngtngcnacngaygcnacngtnwsnttyaaracngcnytntggttytggatgacnccncarggnaayaarccnwsnwsncaygaygtnathacnggnmgntgggcnccnwsnccngcngaygcngcngcnggnmgngcnccnggntayggngtnathacnaayathgtnaayggnggnytngartgyggncayggnccngaygaymgngtngcnaaymgnathggnttytaycarmgntaytgyggngcnttyggnathggnacnggnggnaayytngaytgytayaaycarmgnccnttyaaywsnggnwsnwsngtnggnytngcngarcar

SEQ ID NO: 357 - DNA, 759 bp, Solanum chilense
  source 1..759: mol_type = genomic DNA
atgaarttyaayathgtnwsnccngtngcnytnwsntgyytnttyttyytnttyytnacnggnacnytngcncaraaygcnggnwsnathgtnacnmgngarytnttygarcaratgytnwsnttymgnaayaaygaygcntgyccngcnaarggnttytayacntaygaygcnttyathgcngcngcnaaywsnttyccnggnttyggnacnacnggngaygayacngcnmgnaaraargarathgcngcnttyttyggncaracnwsncaygaracnaarggnggnwsngcnggnacnttyacnggnggntaytgyttygtnmgncarathgaycarwsngaymgntaytayggnmgnggnccnathcarytnacncaycarwsnaaytaygarmgngcnggncarggnathggngtnggncargayytngtnaayaayccngayytngtngcnacngayccnathathwsnttymgnacngcnathtggttytggatgacngcncargayaayaarccnwsntgycayaaygtnathathggncartggacnccnwsnccngcngayacngcngcnaaymgngtnccnggntayggngtnathacnaayathathaayggnggnytngartgyaayatgggnccnaayacngcngtngarwsnmgnathggnttytaymgnmgntaytgyggnatgytnaaygtnccnacnggngaraayytngaytgyaayaaycaraaraayttygcncarggn

SEQ ID NO: 358 - DNA, 998 bp, Hordeum vulgare
  source 1..998: mol_type = genomic DNA
ctacgacagtagcgtaagcgtaacaccgagtacgtactctgtgctttgttggctcgcacaatgagatcgctcgcggtggtggtggccgtggtagccacggtggccatggccatcggcacggcgcgcggcagcgtgtcctccatcgtctcgcgcgcacagtttgaccgcatgcttctccaccgcaacgacggcgcctgccaggccaagggcttctacacctacgacgccttcgtcgccgccgcagccgccttcccgggcttcggcaccaccggcagcgccgacgcccagaagcgcgaggtggccgccttcctagcacagacctcccacgagaccaccggcgggtgggcgactgcaccggacggggccttcgcctggggctactgcttcaagcaggaacgtggcgcctcctccgactactgcaccccgagcgcacaatggccgtgcgcccccgggaagcgctactacggccgcgggccaatccagctctcccacaactacaactatggacctgccggccgggccatcggggtcgatctgctggccaacccggacctggtggccacggacgccactgtgggctttaagacggccatctggttctggatgacggcgcagccgcccaagccatcgagccatgctgtgatcgccggccagtggagcccgtcaggggctgaccgggccgcaggccgggtgcccgggtttggtgtgatcaccaacatcatcaacggcgggatcgagtgcggtcacgggcaggacagccgcgtcgccgatcgaatcgggttttacaagcgctactgtgacatcctcggcgttggctacggcaacaacctcgattgctacagccagagacccttcgcctaattaattagtcatgtattaatcttggccctccataaaatacaataagagcatcgtctcctatctacatgctgtaagatgtaactatggtaaccttttatggggaacataacaaaggcatctcgtatagatgctttgct

SEQ ID NO: 359 - DNA, 978 bp, Oryza sativa
  source 1..978: mol_type = genomic DNA
atgmgngcnytngcngtngtngcnatggtngcnacngcnttyytngcngcngcngtncaygcngarcartgyggnwsncargcnggnggngcngtntgyccnaaytgyytntgytgywsncarttyggntggtgyggnwsnacnwsngaytaytgyggngcnggntgycarwsncartgywsngcngcnggntgyggnggnggnggnccnacnccnccnwsnggnwsnggnggnwsnggngtngcnwsnathgtnwsnmgnwsnytnttygaycaratgytnytncaymgnaaygaygcngcntgyccngcnwsnaayttytayacntaygaygcnttygtngcngcngcnwsngcnttyccnggnttygcngcngcnggnggngaygcngayacnaayaarmgngargtngcngcnttyytngcncaracnwsncaygaracnacnggnggntgggcnacngcnccngayggnccntaygcntggggntaytgyttyaargargaraayggnggngcngcnggnccngaytaytgycarcarwsngcncartggccntgygcngcnggnaaraartaytayggnmgnggnccnathcarytnwsntayaayttyaaytayggnccngcnggncargcnathggngcngayytnytnggngayccngayytngtngcnwsngaygcnacngtnwsnttygayacngcnttytggttytggatgacnccncarwsnccnaarccnwsntgycaygcngtngcnacnggncartggacnccnwsngcngaygaycargcngcnggnmgngtnccnggntayggngtnathacnaayathathaayggnggnytngartgyggncayggngargaygaymgngtngcngaymgnathggnttytayaarmgntaytgygayathytnggngtnwsntaygaygcnaayytngaytgytaywsncarmgnccnttyggnwsn

SEQ ID NO: 360 - DNA, 1098 bp, Brassica juncea
  source 1..1098: mol_type = genomic DNA
aaataaaattcatcaaaataacccatccaaaagagtccaaaataacaaatgacaattccacctttattttaacaaaaattatattcaaactagacaaacatgataattgtgatatagtttctcaacaagtttcaaaaacaattatagttttccaccataattgtaaacacacatattttcgccaaaaccataaaatatatattctcgctaaaacaacaagaaaaacatttgtccgtgaattccatctcttctcataaacttcatcttccatcgtatcaagcgaacccatcctattggggggtatgtgattcatgagccttaattagggtggtacagtcagcgactcctgagcttcagagagggtagtccagcagctagtgactctgctagagatagtgtggcccagctagtgagtagtgactcatgaggtagagagagggtggtccatcatatatcgtgttagacaaattctatatagacaatgaggtaaatgtgggatatgaaggtggtggcaaattttagaacaattagtatttaagtatagtaaacataaaaacaaaccagcactgcttatcttcgattctatcaagcgaacccaccttatattgaattaatttatggtagcagtgattcgtgaacgtcagagagggtggtccctctagtgactcatgagctagagagagggtggtccagctatcgtgtagaaatattctatagaccattagataaacgtgccaaatgaacttggtggtgacaaaatagaagtttagaatgtttgggttcccggtaaaaaggtgaaaccacctttttttttttttttttttaccaacgttgaattggcctaatgataaaagggttacgcttgtaactaccgccacccaggtttaattcacggtgggagagactatttataatgcttaggtttctggcaaagaagtgaaaccactttttttctttccagaaaaaatagaagtctagaaaacataaaaacaagtatataaaattcgatgtgatttaacactaactgattttgtacattgcatgttgctatatatacccttacttgcctcttaaaacaaccatacagctcagagaaac

SEQ ID NO: 361 - protein, 36 aa, Medicago truncatula
AFIQLSKPCISDKECSIVKNYRARCRKGYCVRRRIR

SEQ ID NO: 362 - protein, 40 aa, Fagopyrum esculentum
AQCGAQGGGATCPGGLCCSQWGWCGSTPKYCGAGCQSNCK

SEQ ID NO: 363 - protein, 40 aa, Fagopyrum esculentum
AQCGAQGGGATCPGGLCCSQWGWCGSTPKYCGAGCQSNCR

SEQ ID NO: 364 - protein, 186 aa, Capsicum annuum
MMNANGFSGVEKEYIRKHHLHQPKENQCSSFLVKHIRAPVHLVWSLVRRFDQPQKYKPFVSRCIAQGDLEIGSLREVDVKSGLPATTSTERLELLDDEEHILSFRIIGGDHRLRNYSSIISLHPEVIDGRPGTLVIESFVVDVPQGNTKDETCYFVEALINCNLKSLADVSERLAVQDRTEPIDQV

SEQ ID NO: 365 - protein, 327 aa, Phaseolus vulgaris
MKKNRMMIMICSVGVVWMLLVGGSYGEQCGRQAGGALCPGGNCCSQFGWCGSTTDYCGKDCQSQCGGPSPAPTDLSALISRSTFDQVLKHRNDGACPAKGFYTYDAFIAAAKAYPSFGNTGDTATRKREIAAFLGQTSHETTGGWATAPDGPYAWGYCFVRERNPSAYCSATPQFPCAPGQQYYGRGPIQISWNYNYGQCGRAIGVDLLNKPDLVATDSVISFKSALWFWMTAQSPKPSSHDVITSRWTPSSADVAARRLPGYGTVTNIINGGLECGRGQDSRVQDRIGFFKRYCDLLGVGYGNNLDCYSQTPFGNSLFLSDLVTSQ

SEQ ID NO: 366 - protein, 340 aa, Oryza sativa
MSTPRAAASLAKKAALVALAVLAAALATAARAEQCGAQAGGARCPNCLCCSRWGWCGTTSDFCGDGCQSQCSGCGPTPTPTPPSPSDGVGSIVPRDLFERLLLHRNDGACPARGFYTYEAFLAAAAAFPAFGGTGNTETRKREVAAFLGQTSHETTGGWPTAPDGPFSWGYCFKQEQNPPSDYCQPSPEWPCAPGRKYYGRGPIQLSFNFNYGPAGRAIGVDLLSNPDLVATDATVSFKTALWFWMTPQGNKPSSHDVITGRWAPSPADAAAGRAPGYGVITNIVNGGLECGHGPDDRVANRIGFYQRYCGAFGIGTGGNLDCYNQRPFNSGSSVGLAEQ

SEQ ID NO: 367 - protein, 253 aa, Solanum chilense
MKFNIVSPVALSCLFFLFLTGTLAQNAGSIVTRELFEQMLSFRNNDACPAKGFYTYDAFIAAANSFPGFGTTGDDTARKKEIAAFFGQTSHETKGGSAGTFTGGYCFVRQIDQSDRYYGRGPIQLTHQSNYERAGQGIGVGQDLVNNPDLVATDPIISFRTAIWFWMTAQDNKPSCHNVIIGQWTPSPADTAANRVPGYGVITNIINGGLECNMGPNTAVESRIGFYRRYCGMLNVPTGENLDCNNQKNFAQG

SEQ ID NO: 368 - protein, 326 aa, Oryza sativa
MRALAVVAMVATAFLAAAVHAEQCGSQAGGAVCPNCLCCSQFGWCGSTSDYCGAGCQSQCSAAGCGGGGPTPPSGSGGSGVASIVSRSLFDQMLLHRNDAACPASNFYTYDAFVAAASAFPGFAAAGGDADTNKREVAAFLAQTSHETTGGWATAPDGPYAWGYCFKEENGGAAGPDYCQQSAQWPCAAGKKYYGRGPIQLSYNFNYGPAGQAIGADLLGDPDLVASDATVSFDTAFWFWMTPQSPKPSCHAVATGQWTPSADDQAAGRVPGYGVITNIINGGLECGHGEDDRVADRIGFYKRYCDILGVSYDANLDCYSQRPFGS

SEQ ID NO: 369 - protein, 135 aa, Arabidopsis thaliana
MEGKTVIFSVLVMGLVISQIQVEAQKTCCPSQSTRKEFEDCISEGNLQILCSAESGCRDTYVGYCPSGFPYGSLTNSGDVVNVYCKLGCVSSLCGALTSLQKLDTSGKVNVAVERCTKACSTICTKGSKTAVETV

SEQ ID NO: 370 - protein, 61 aa, Vigna mungo
PNPKVFFDMTIGGQPAGKIVFELFADTTPRTAENFRALTTGEKGVSRGRKPLHYHGSIFHR

SEQ ID NO: 371 - protein, 512 aa, Camptotheca acuminata
MENLYYCLALLLSILFIFRHFFRHSSKLPPSPFALPIIGHLHLIRNSLHQVLECLASQYGPILFLKFGTRSILVVSSPSAVEECLIKNDIIFANRPRSMILDLSSFNYSIFSWAPYGHYWRSLRRLAVVELFTSRSLQTSSNIRKEEIHNLLCHLFKFSKSGTQKLQLKYWFSLLTFNIITRLVAGKRCVRDAVAGTDSGKQILEDLEGKFTSKMPFNMCDFFPILRWFGYKGLEKILITLHKERDEFMQGLIDEVRRKRTCSANINSVTNRAKTTLIEALLSLQESEPDFFSDTIIKSIISDMFFAGPETSTITLEWAMSLLLNHPEVLGKLRAEIDDHVGHGRLLDDSDLGKLPYLRCIINETLRLYPPTPLLLPHCSSEDCIVGGYEIPQGTILWVNAWAMHRDPKLWEEPTKFKPERFEGMEGRERYKFMPFGIGRRACPGASMAIRTVSLALGALIQCFEWENVGPDKREMSQGRLTLPKAESLEAVSIPRPSAVKVLSQLEGTCFR

SEQ ID NO: 372 - protein, 105 aa, Nicotiana alata
MARSLCFMAFAILAMMLFVAYEVQARECKTESNTFPGICITKPPCRKACISEKFTDGHCSKILRRCLCTKPCVFDEKMTKTGAEILAEEAKTLAAALLEEEIMDN

SEQ ID NO: 373 - protein, 266 aa, Triticum kiharae
MGVKGGGVLWCLLLAGLLLLAVACAAERDTEKEKEEEIRWCEEDCDWKAGQDTGKARECKEQCERRRHGHELLQEDGDSFDSCVSKCRGHGGWWGKERWERCRQICRQSQEGEGGDEGDNTDDRCERMCQHYHDRREKKQCMKGCRYGESDLLSSDDGHEHGDRCQTQCKRLRPGSYDRQQCIEKCQCQQKEDEEVMNHHGGGGHGHGGSSCEQKCQQRYRHEYDKQQCVRDCKSGGGGGAGGRGREGDERQHGREMVIEAILEEV

SEQ ID NO: 374 - protein, 320 aa, Euonymus europaeus
MKYLWVFIVFSIAVLSHACSAQQCGRQAGNRRCANNLCCSQYGYCGRTNEYCCTSQGCQSQCRRCGVRTVGEIVVGDIGGIISKGMFNNILKHRDDDACEGKGFYTYEAFVAAARSFPAFGSTGDDATRKREIAAFLAQTSHETSAGWPSAPDGPYAWGYCFVRERNPPSKYCDTTTPCPKSYYGRGPIQLTWNYNYEQAGRAIGADLLNNPDLVATDAVISFKTAIWFWMTAQSSKPSCHDVITGSWRPSASDNSVCHVPDYAVVTNIISGEIEYGKSRNPQVEDRIEFFKRYCQILGVSPGKCYEERTFVSGLMMETI

SEQ ID NO: 375 - protein, 305 aa, Euonymus europaeus
MKYLWVFIVFSIAVLSLACSAQQCGRQAGNRRCPNNLCCSQFGYCGRTNEYCCTGFGCQSNCRRCGVRTVGEDVVGDIGGIISKGMFNNILKHRDDDACEGKGFYTYEAFVAAARSFPAFGSTGDDTTRKREIAAFLAQTSHETSGGRPSAPDGPYAWGYCFVKERNPPSKYCDTITPCPKSYYGRGPLQLTWNYNYAQAGRAIGVDLLNNPDLVATDAVTSFKTAIWFWMTAHSSKPSCHDVITGSWRPSASDNSVRHVPDYAVVTNIINGEIEYGKSRNPQVEDRIEFFKRYCQILGVSPGKF

SEQ ID NO: 376 - protein, 38 aa, Taraxacum officinale
VAKCTEESGGKYFVFCCYKPTRICYMNEQKCESTCIGK

SEQ ID NO: 377 - protein, 44 aa, Taraxacum officinale
GGKCTVDWGGQGGGRRLPSPLFCCYKPTRICYLNQETCETETCP

SEQ ID NO: 378 - protein, 42 aa, Taraxacum officinale
ANKCIIDCMKVKTTCGDECKGAGFKTGGCALPPDIMKCCHNC

SEQ ID NO: 379 - protein, 49 aa, Triticum kiharae
RTCQSQSHKFKGACFSDTNCDSVCRTENFPRGQCNQHHVERKCYCERDC

SEQ ID NO: 380 - protein, 47 aa, Echinochloa crus-galli
RECQSQSHRYKGACVHDTNCASVCQTEGFSGGKCVGFRGRCFCTKHC

SEQ ID NO: 381 - protein, 47 aa, Echinochloa crus-galli
RECQSQSHRYKGACVHDTNCASVCQTEGFSGGKCVGFRGRCFCTKAC

SEQ ID NO: 382 - protein, 30 aa, Amaranthus caudatus
AGECVQGRCPSGMCCSQFGYCGRGPKYCGR

SEQ ID NO: 383 - DNA, 3666 bp, Oryza sativa
  source 1..3666: mol_type = genomic DNA
atggaggccacggcagtgagcattggcaggtccgtgctgaagggagcgcttggctttgccaattccaccttggtggaggaggtttccctgcagctcggcgtccagcgcgaccaggcgttcatcagggacgagctggagatgatgaactccttcctgatggccgccaatgatgagaaagatgacaacaaggtggtaaggaccttggtgaagcaggtccgcgacgtggcctacgacgtcgaggactgcctccaggacttcgccgtccgcttggggaggaagagttcatcctggtggctcagccctcacacgctgtgggagcggcgccgcatcgccaagcagatggaggagctgaggggcaaggttgaggatgtgagccagaggaacatgcgttaccaactcatcaagggctccaagcctaccgtagctaccaatgtcgcacccagcagcactgcccgtgcgaccatgtctggcgcgcatgaagaacgatggcagcatgagaaggcaatagatcatctggttcggctggtcaaaaccaaagtcgatgaacgtagagtgatcgcggtgtggggaacaagtggtgatatcagggaaatgtccatcgttggaggggcctatgatcatctcaagagaagcaacaagtttgagtgctgtgcctgggtaaatttgatgcatccactgaacccaacaaagctcctgcaaaccattgttaggcaattctatgtaagatctcttcaggaggctggcaaagcaactccgtcgtgtcaaattctgagtagcatgttgataaaggaagatcagggtttggggtttagggttctgaggagcatgctgatgaaggaagatcatttgaatgatgagttcaataaatatttgagtgacaagtgctacctcattgtgcttaatgacctatcgtccgctgaagagtggaagcaaattaaaatgctcttcccagacaacaagaaaggaagccgaatcatagtgttcacacaacaagttgaagttgcaagcttttgcgctaggacagaggaggtggcacccgagcacatgcagttgtttgctgatcagactctttatgcttttcactgcaagggtgctaaagatggagtagattcaatggaggactcatctaacttaaacgaagacactacatacaacgctgtagaaggaaagagccttactcgcacatattcaatggtaactgctttcaaggaatctgagatcgttgggcgagttgatgaaataaaggagattattgaactgatttcaaaaggtagcaaccaacttgagaagatctcagtgtggggaatgggtggtattgggaaaaccactctaattcaaaatgtctaccgaagcgaaaaggttaagaagatgtttgataagcatgcatgtgtcacgatcatgcgcccgttcaatcttaatgatcttcttatgatcttagttaggcaactagaagattcaaaaacttctggaggaaaggagttggttagcattttacaaggaaagaaatacttgattgttcttgatgatgtattattcacaacagaatgggatgctatagaatcatatttcccagcaacggaaacaggaagccggatcataataaccacaaggcatgaaagtattgctaagcattgttcaggggatcaacaaggaaaaatgtatcaactcaatcgtctaggagacaacgatgcaaagaacctctttgcaaagaaggtatttaaggagtcagtaaatttggatcaacaagatcttgaattgatcaaagaagcgaaaccgattctaaagaagtgcaatggacttcccctcgcaattgtcaccataggtggtttcttggcaagcagccccaaaactgctttggagtggagaaaattgaatgagcatattagtgcagagttggagacaaacccagggcttgaggccatcagagctgtccttaatataagctacgatggattaccttatcacctcaagtcttgcttcttgtatctgtccatctttcctgaagatgacaagattagccgggaacgtttggtgcgccgatggtgtgcagagggttactcaagggagctatgggacaaatctgcagaggaaatagcaaacaactacttctttgaactcatagacagaagcatgatcctaccaactcaaaaattaacttacaacaatagacctgattcttgccaggtccacgatatcatgcgcgagatagccatctcgaagtcaaaggaggaaaatcttgttcttagactcgaagggggtcataggctacacaatcatggcatagttcgacatctttccattacaaacagcggcgaggatcgggagacagattttgctgaattggagacaacagtagacatgtcccgaataagatcattaacagtgtttggggagtggaagccatttttcatttctgacaagatgaggttgttgcgtgtgctcgacttggaagacacagaaggtgtacgtaatcaccatattaagcaaattgggaagctccttcaccttagatacctttctctaaaacgatgtagggagattgcttacctgcctgattccttaggtaacctaaggcaactggagatactagatatcagaggtacgctcatagtcaggctgccaaagaccatcatcaatcttcgcaagctaaagtatctccgtgctgttccaaacatagacgacatagcagagattctaattctaccagagctcatgaggaacaggctatgcatttctactgtttcgttgctggggctttgtctgctatgctcagcaagtgcgattggtaagtttgatgaagagactagtacccgtgacctctgcaccatgtggtgctgcagtattctccctagcattgctatgcgcctccaagggaatggtgtagtagcaccaagagggctgaggatcaggagactgacagccctgcacacgctaggtgtggtggacatttcatggcagccatcaattttacaagatatcaagaggctcatccagctgcgcaaattggaagtgaccggtgtcaacaagaaaaatagcaaaaagcttttctctgcccttgccgctctcagccaactagaatcattgtcactgttctcgaagtggaagccaggtctctggggctgtctggatgctgaagaaaagttttcgccacctaagaatctcaagactctgaagcttcaaggcaacctggttgagctgccaaaatggatcgggaagctcaacaatcttgttaagctgaagctatcaaaatccaggctcaaggatcatgatgctgctatacaagtccttggtatgctaccaaacctgaccatcctatgcctgccgcgcaagtcatttcactcgcttgagggtggtgaactcaatttctcggagggatctttcaaaagcctggtggttctcgagctccacttcggtgggagcaaacgcgtcaagtttcaacaaggagcattccacaatcttgagctactggagctttcaggttacattgataaagtcgaaactaagttctctgggctagaatttctcccaggaatcaaggaagtctggctccagggtgaattttattccagaaacgagcaagccgcacgaagattgaaagaggacttgctggcacagctttctgagaatccaaagaaaccaatcctgaagactagcgggtatttttag

SEQ ID NO: 384 - DNA, 9576 bp, Oryza sativa
  source 1..9576: mol_type = genomic DNA
ggaaatactagaatgacttacattgtaaaacagagaaagtatgattatctaaactctcagatagtctattgtaatcattgtatgcatgacatcagcttgtgtcaaagctgcagctttgttggatcaaccagaatttactagttctaaaaaaaacagaatttacttagatcctgctgaaagacttcgggccaattagaagcccagtatttggcccaaaactggtgtaaactacaggcccataatagaaataagttcactggaggtcccccaacttaacaccgagatttttttgaggtcccttaaccataaaccagaaatgcgtacccctaaactatgtaaaaccgtcaaaaaaaaaaaggtcccgaggcagtatagttgctcggtttcgctgacgtggcatcctagtcagcaaaaaaaattaaaataaatatgtggggcccacatgtaagtgagagaaaatggtgtgggccccacatttctcctttcttttctttttctcttctcttctctcccgattttctcgagtgggcgcggcggcagaggggagagaggtgaccggcggtggagcgggggtggtgggagaggggggctggcgcgacgtcggcggcgggagaaaaggagaggaggcggctggcgcgacggcgagctcggacggcaacggcgggaggaggaggaggagaggaggcagtcggcgctgtaaaacgcgcatgggatgcggcggatgatgtcgagcgggacggtgtcctcatcaccatcttcctcatcgtcatcgcagtctgcgggtgccgggcggagcggtttgggagggagggggaggcggccagcgagcccgttcgagctcgcccggcctgcgcgcgagctcgcccctcccatagcttggtgtgctggggacgacgacgaggaaagggggagaaaggaattgacggccgatgatagcaatggcgggcgagcgcggcgccgggctgctcatgctcgccgaccaggcccccggcttcgccgcactcgtccgccgtgctcgcccacgcactcgccgacctccgctccacccgccgctcctgcccgctgcccgctgcccgccggcctccctgactgaagaagagaagagagaaattaaagagaagagaaggagaagaaaagagaagagaagaaaaaaagatgtgtagctgacatgtgggccccatgtacttttttattttttttgctgactagaatgccacgtcagcgaaaccacccatatatactgtcataggaccttgagtgcatagtttgtgtgagtttagggatacacatttctcgttttgtagttaagggacctcgtaaaaatctcgctgttaagttgagagacccctccggtgaacttattcccccaaatattttctccatgctctgggctcaaacgcactcttggatgggccgtgtaatctacaccatttctggcccaatccaacgaaggtagctccagactcctaactccgccgccgcatgcccaatcctcgccggccgccgctgccatctcccttcccccaccgccaccgtcgccttctccgttcccccaacaaaggctcagtagcagcagccgcggcgcggagagcagaggccttggagggcctgcagaggagcgcccgcgtcgacgaagacgacatcagcaggcagtggacatggcgactgcgaatgctatcgccgacgtgggagcttcaggcgaggatgcgtggccttcatcagctgctgctcccttacctgctctggtttgtcattgtgttggttcgtggtttggggatatcaggatggggaaggggaatgggtttcgtgccatgttgttctattgtgcaatttgatgttctcttgtcgaatttcatggtgattcaatctgcatctgtgttattggttgtcaagcaaacattttatttctttcgagatgggtgtttcatctgaaattggtgtgtctgatgatgtgaccttgtgcaaatcattgtttcattttcttctattccacagagatttttttgtttagagtttattctaccatcttcttaccttttgaatgctatgcaccacagatttctgatttttacacattcaatcacagtgccgacccttggcgaatttaaaattttctcaccgtcaaaatttaatcaaacatctgatctaacagtagtagcgccagcacggctggtatttaaggcagaaagaaaggttgcgagggcgaggagttggtgatgatctgccggtcgtgtcgtgactttaggctataaaagatagctgtttggattaacccaaccaatgaagcgaatcatcgatggccgatagcgagattatatccaactaatgaagagaatcaactttaatcttttgtgagctacaagtttcgtggtgaaggcatatactaataccaccatcatggctgcagcgaatcaacgagatgcatttgtcttgcacatttcccaccggatactttgccatccatggctttatctcctccatgattgtatccccttcttcctcaacaaggaacgatcgatcattgtttgcttctttctctgacgacactttggtgcaagtgaaaggctctttcctggaactcgtcccgtgagctccttcctggctacatcctccttaattccttgccgatttccggcttcgtcttcactatcgtcagttcatttctcccgctctgcctgagagtccagtttcttggagatagtcgccggcttgctctctctctctctctcccttctcatcgccagctccagctcacaatccgagcttacgtggtggaatcgctatcgccacctctcggaagattattgtactttgccttgcctacttcttgagtccgatcaaacacatccatcatgcatctgtttgtacttgcattcagccaaacacttccagtttaactccgtccgcaagtcaatacttgcattcaatttccatttcctacaaaagcagctgctcagactcttgccttctccacccagcaatcgtgtttccttccctgtatcctgcgcgtgtgttcttagctgctctaggggatccttccaatggcggagctaatggccaccatggtggtcgggccactgctgtccatggtgaaggacaaggcctccagctacctcctggagcagtacaaggtgatggagggcatggaggagcagcacgagatcctcaaacgcaagctgccagccatcctcgacgtcatcgccgacgccgaggagcaggcggctaaacacagggaaggggtgaaagcatggctcgaggcgctccggaaggtggcctaccaggccaatgacgtcttcgacgagttcaagtacgaggcactccgccgcaaggccaaggggcactacaagatgctcagcagcatggttgtaatcaagctcattcctactcacaaccgtattctgttcagttataggatgggcaacaagctcaggatgattctgaatgccattgaagttctaattgaagagatgaatgcctttaggtttaaattccgaccagagccaccaatgtcgtccatgaaatggaggaagacagattctaaaatctccgacctttctttggacattgccaacaactcaagaaaggaagataaacaggagattgtcagcagattgcttgttccagccagcgaaggggatctcactgttcttcccattgtaggaatgggggggatgggcaagaccaccttagcgcagctcatttacaatgaccctgacattcagaagcatttccagttgctgctctgggtgtgtgtttccgacaacttcgatgtggatttgctggctaaaagcatagttgaagcagctcgcaaacagaagaatgataacagtggaagtactaacaagtcaccattggatgaacttaaagaagttgtgagtgggcagaggtacctcctcgttttggatgatgtctggaaccgtgatgctcgtaagtgggaagcgctcaagtcctaccttcagcacggtggcagcggtagctcagttttgacaacaactcgtgatcaagaagtggctcaagtgatggctccagctcaaaaaccttatgatctcaagagactgaaggaaagcttcatagaggaaattatcaggacaagtgctttcagttcacaacaagaaaggcctcctgagcttctcaaaatggttggtgatattgccaagaaatgttctggttcccctttagctgcaacagcattgggctctacactgcgtacgaagaccaccaagaaagaatgggaggctatattaagcagaagcacaatttgcgatgaggaaaatggaattttaccaatactcaagctcagttacaattgcttgccatcatatatgcggcaatgcttttccttttgtgcaattttccccaaggatcatgagattgacgtggaaatgctgatccagttatggatggccaatggttttatcccagagcaacaaggagagtgccctgaaatcattggtaaaagaattttcagtgagttggtgtcaaggtcattttttcaggatgcgaaagggatcccgtttgagttccatgatataaagaactctaagattacttgtaagatccatgaccttatgcatgatgttgcacaatcctccatgggaaaagaatgcgctgctatagatacagaagttagtaaaagtgaggattttccttattctgctcgccatctatttttgtcaggtgatagaccagaagctattcggactccttccccagagaaaggatatccaggtatccaaacattaatatgttcacgtttcaaatatttgcagaatgtatcaaaatacaggtcattgcgagtattaacaacgatgtgggaaggttcattcctgataccaaaatatcatcatcacctgaggtatcttgatctctcagaaagtgaaattaaagcacttcctgaagacataagcatcctatatcatttgcaaacattgaacctttcccgttgtttatctctccgtcgacttccaaagggaatgaagtacatgaccgccctccgtcacttgtacactcacggatgttggagtttaggaagcatgcctcctgacctcggacacctcacttgcctacagacgcttacatgctttgtagccggtacttgctctggctgcagtgatttgggagagctgcggcagttggaccttggtggtcgactagagctaagaaaactggaaaatgtgacaaaagctgatgcaaaagcagcaaatctcggaaagaaggaaaaactgaccaaattgaccttaatatggactgatcaggagtacaaggaggcacagagtaataatcataaagaggtgctggaaggtctcacgcctcacgaggggctcaaggttctgagtatatatcactgtgggagcagtacatgtccaacttggatgaataaactgcgggacatggtggggcttgagttaaatggttgcaaaaatctcgagaagcttcctccgttgtggcagctaccggctctacaagttctttgcctggaaggactgggtagtttaaattgcttgttcaactgtgacacacacacacccttcacattttgcagactgaaggagctaaccttgtctgatatgacaaattttgagacatggtgggacacaaatgaggtacaaggagaagagctgatgtttcctgaggttgaaaagctgtcaatcgaaagttgccataggctaactgccttgccaaaagcatcaaatgcgatttcagaatcgtccggcgaagttagcaccgtgtgtcgttctgcatttccagcattgaaggaaatgaaattatatgatttgcgtatctttcagaaatgggaggcagtcgatggaactccaagggaggaggcaacatttcctcagcttgacaaattagaaatcagacagtgcccagagctgactactctacctgaagcaccaaagctaagtgacttagagatatctaaaggcaatcaacaaatatccctacaggcagccagcagacatattacttcattgtccagtctcgttctgcatttgtccactgatgacacagaaacagcatcggtggccaagcaacaagattcgagtgatttggtgattgaggatgagaaatggagtcataaatctcccctggaacttatggtcttgagtcggtgcaaccttttattctctcacccaagtgcactggctctgtggacatgttttgctcagctcctagatctgaaaattcggtatgttgatgcgcttgtcagctggccagaagaggtgttccagggcttagtttccttgaggaagttagagatttctgtatgcgagaatctgacaggacacacacaagctcgtgggcaatctacacccgcaccaagtgaactcctgccacgtttggagtccctagagataacgtgttgtgattctattgtggaggtccccaatctaccggcgtctctcaagctattagaaattagggggtgccccggcctggagtccatcgtattcaatcagcagcaggataggacgatgttggtgagtgcagaaagctttgcagagcaggataagtcatcgttaatatcagggtccacaagcgagaccaacgatcacgtccttccacgcctagaatctcttgtaataaattggtgcgatcgtttggaggttctccatcttcctccgtccatcaagaaattgggtatttatagctgtgaaaaacttcggtccctctcagtaaagctggatgccgttcgagaattaagtatcagacattgcgggagcttgaaatcactggaatcttgcttaggagagctcgcgtcgctgcaacaactcaaactttttgattgcaagagcctggaatccttgccgaaggggcctcaagcatactcatctcttacatctcttgaaattcgtggttgttctggtataaaggtgcttccaccgagcctacagcaacgtctggatgacatcgaggacaaagaactagatgcctgctatgaaggtaatcttcagtttcttaaccgtgtaccatttagtggtaaaagtttcgagtttcgtgtctagaacccctagtcaaccattaatatgattatatgtacatagagtacaatgcgcattcataactcacttctgcagctgtgtcatctaaaccctttaaactttgagttgcatttgggtatctaatcgcatgcaaaggaatttagttatatctcccgtagccattccttatatgtgatgatctcttcctgtgattatgcttgctagtttggactatgtaattaattttgccgggtgactatgtaattacatgacttcatttagtcgccaggtgtggcatcatgcaattattatggcaaagctgtattagtcatgatcgaagccacttggtgaacttattccctgctactttgaaccaatactcattgattatttccctttaagcgtttgatatggacgacagtttaaatttgcagagctaactaacgcagcgcttgtctttacatttctctggaaactcacagctccattgcatatgtagtttgagtatacatagtttctttgaactgtcttatgcctttgaaaagcttgactatggaattctagtctatatattcaatacatatatttttttttcttttgtttgccagaggcagaagcagaaccaaagtctcgtcatcgtcaatctgcaatcagtaggctgatgtgcttgaagtagcagtttcaggaccagatgagagttgtcatcatggtttgtaacgcgtgcttgatgattgatttcgaatgaaattctagccactatccttatgcttactctctctatggtgtgacttccttgtaggatcgttaccgaatctgcaattgttgggttattaattgtgtggttgtatctcatggtagaatgtattacctacctaccctttctcaagataaactccagtaaagtcgatcgtctggttggtgtgagctgctacaagaaggatgaagccgatgatcccaaggccttgactttaagctagtcccaggttgtaagctgaagaacaacatactggagcttaaactgcttcactctttttttatccttttccttttcttgtgaactgtgatgtgtttgatctcgttcatgctccatcataagagaatcacagctagcacttccatttcaatgatgtttttcctaacatgacatgactgcagaggatacttgtgattgatcaacaacattttgcagcaacgttctctcccgataacgctgcaatggaattgatcaattggtgttcctacttattggaatgaatttcccattgtggaataaaatggaaagattggtacaatctgctgaaaaatgaactgtcgttactcaagttgaaacatgtgtcatgtgtgtaactatcagaattgttctcgacaaaatcgttgggacttgcaaggtaaaaaaaaaaaattcctcagctctgtaaatgctattgctgaactaaagttcagaaagctatagtgccgaaagatctcagatggcctactgcaacaaaattcagtacaaatgcaaaacaatgtaacattacgtggcccagcccatcatggtaagcccatactgtatgcgctgcaaactaatattagttcaggcaattactctgaaatttctgatagacgaacctgattttttcatgtcaggtgccgtgcttgttcagattcagcaacttacatttccaaagaagaaaaaggaaattcataccttctctttatttggtttttaaaagtggcctggattttcattatttggttaaaatttggcctttgtcgtaaggatttggatcctctatccaaacacatgccttccaagataaacgaatccctcattatacaaaaaaaaaagcacaagatgctcaacaagaagcttcaaattcgtgtaaatacatgtcatgtctcgctaccaaacaatatctcaacaatgacaacagattggaggtattcatctcacaatgatacatttcaacacaaatttatgtaggcctcgctgacaggacttggctggatggctgtcagttcagttcttgaaccaactgaagcatgagcagccctgcaaggaagcgataaactgaattaaaataggaatttgttacacaatacctgtaaagtggattacattaaaatattaccaaatcatactgtaagcaatcatacagtacaagattccttgcaaacaaccctaaccaaacttctagtaaaaccattattttttctgtagtaccaactttttgcaaccactatatactccagtaaaaaccagaagtattgttgcaatgactttgccgataaattatagaacgcggctactcgaagcagtagatttaagacaatttttactgcataataactacgcatggtgtcaagatccctaaaaattaacagaggcagacccagctcaagtattgacaaactcaagtggcaactggcatatgaacaattttctcgttcaaatatatctgaagcaatgtgtaaaacaaattagttttgctccacacatctgacaataatttttttcagtaagcagacttactgtggattcatatttgcgttgttgatagcgtttgatataatctgcctcgctagtcatgacgggagcgttgccggtacc

SEQ ID NO: 385 - DNA, 3720 bp, Arabidopsis thaliana
  source 1..3720: mol_type = genomic DNA
atggattcttcatgtttcttggtttatagaatattcagatttcgtaaaagaaataagaatatttcttcttctctatcttcttcatctcccccttcttctttgtctcaaaattggttgcaccctgttttcttgagcttccgtggggaagatgtccgcaaaggcttgctcagtcacattcagaaggagtttcaaagaaacggaatcacaccgttcattgataatgagatgaagagaggaggatccattggtcctgagctcttacaggctattagaggatctaagatcgcgatcatcttgctttcgaggaactatggttcttcgaagtggtgtcttgatgaattggtggagattatgaaatgcagagaagagttgggtcaaacagtgatgaccgttttttatgatgtggatccatctgatgtgaggaagcagaagggagattttgggaaggtttttaaaaaaacttgtgttggaagaccagaggagatggtacagagatggaagcaagctttgaccagcgctgcaaatatactcggggaggattctcgcaactgggaaaacgaagcggatatgatcattaaaatctcaaaagatgtctccgatgtgttgagttttacgccatcaaaggattttgatgagtttgttggcattgaagctcatacgacggagataacttcgttgttacaacttgatctggaagaagtgagaatgatagggatttggggtcctgctggtattggcaagacgaccatctccagagttctatataacaaactctttcatcagttccaactgggcgcaatcattgacaacatcaaagtacgttatccaagaccttgtcacgatgagtacagtgcaaagctgcagttacagaaagaattgttgtctcagatgattaaccagaaagatatggtggttcctcatttaggtgttgcccaagagaggttgaaggacaagaaagttcttctagttcttgatgacgtcgatgggttagtacaacttgatgccatggcgaaagatgtacaatggtttggccttggaagtcgcattattgtcgtaactcaagatctaaaacttttaaaagctcatgggatcaagtatatttacaaagttgattttccaacttctgatgaggctcttgaaatcttctgcatgtatgcttttggtgagaagtcccctaaagttggttttgagcagattgctcggacggttacaacacttgctggtaaactcccgttaggactaagggttatgggatcatatttacggcgaatgtcgaagcaggagtgggcgaaatcaataccaaggctaaggaccagccttgacgatgatattgagagcgttttgaagttcagttacaactccttagctgaacaagagaaagatttatttcttcacataacctgttttttcagaagggaaaggattgagacattggaagtatttcttgcaaagaagtctgtagatatgaggcaagggctccaaatcttggcagataaatctctcttatctttgaacttgggaaatatagagatgcataatttgctagtacaactaggcctagacattgttcgtaagcaatctattcataagcctgggaaacgtcagttcttggttgatactgaagatatttgtgaagtactcactgatgatacgggtaccagaactcttataggcatagatcttgagttatctggtgtaatcgagggcgtaataaatattagtgaaagagcctttgaaagaatgtgcaatctccagttcttaagattccaccatccatatggtgatcgttgtcacgacatattgtacttaccgcaaggtttgagccatatatctcgaaaacttagactacttcattgggaacgttatccactgacatgtttgcctcccaagtttaatccggagttccttgtcaaaataaacatgcgagacagcatgctcgagaagctgtgggacggaaatgaacccattagaaacctcaaatggatggatttgagtttttgtgtaaacctgaaggagcttcctgatttctctactgccactaatctccaagaattgagactcataaattgtttaagcttggtggagcttccctcttccattgggaatgccactaatttactggaattggatcttattgattgctcaagtctggtgaaactcccctcctctattgggaatctcacaaatctaaaaaagttgtttctcaatagatgttcgagtttggtgaaactcccttcctcttttgggaatgtcactagtctcaaggagttaaatctcagtggttgttcaagtcttctggagatcccctcttccatcgggaatattgttaacctcaagaaagtatatgctgatggatgttcaagtctggtgcaactcccttcctctattggaaataacactaatctcaaggaattgcatctactgaattgctcgagtttgatggaatgcccttcttctatgttaaatttaactcgtctcgaagatttgaatctcagtggatgcttaagtctggtgaagctcccctctattgggaatgttattaatctccaatcattgtatctcagtgattgctcaagtctaatggaactccccttcactattgagaatgccactaatctcgatacattgtatcttgatggatgctcgaatctactggagcttccctcatctatttggaatatcactaatctccaatcattgtatctaaacggatgctcaagtctaaaggagctcccttccttggttgagaatgccattaatcttcaaagtttgtctcttatgaaatgttcaagtttggtagagctcccttcctccatctggagaatcagtaatctctcatacttagatgtcagtaactgctctagtttgctagagctcaatcttgtctcgcaccccgtggttccagattccctaatcctagatgcaggagattgtgagtctctggtgcagagactagattgcttctttcaaaatccaaagattgttctcaacttcgctaactgcttcaaactgaatcaagaagcaagagatctcatcatccagacatcggcttgtagaaatgcgatattaccaggtgaaaaagtgcctgcatacttcacgtaccgcgctactggtgattctttaacagtgaagttgaaccagaagtatcttcttcaatctttgagatttaaagcttgccttttgctagttgagggtcaaaacaaatggccaaattgggggatgaatctagtaacttctcgagaaccagatggacacattgttctgtacacaccaagcagccatcttcaaggtccacttttaatggagaatctgtatacattcgaatttgaactagtggtgacttccagtgagttcgttttggagttcagagctgatcgttacaagtgtgcggtaagcgaatgcggcctaatccaactcttttaaatccctttatgtccatgagcttcagaggtcagtggaggctgttattttgcagtctttgagatttgagacaaacactagactgaagttagggcatgacaagagctgaaatacattaatgctatatgatgaaacattttcttttaaagttgggtcgatttgacaagtttggtgtgcatgttgtgtggtgtcacttagtatgattatcattactatatatgtgatgttggtaatatgtataatttatcaattaagtcacagtatacatctatgtgtttatatgtagatattacagcgaag

SEQ ID NO: 386 - DNA, 2845 bp, Arabidopsis thaliana
  source 1..2845: mol_type = genomic DNA
caaagacttttgaatgtctcccaccaaattctgatgaatgaatatgtggatgtggtatttcatggaccagcacaaaagagcatttcaagaagtcgtttggtagctgtaccatctaattatgttcacatgatgctgagagttgaataattcagaaagggacaaagagtgttatgattgcgttgacttggagtcatgtttcatgaaggtagtgcgtagttgactcttttctagtgtaggaggtagagatttgggagagtcactagaacacgaaatggcagaggctattgtttctgttacagtgcagaagctaggacagttgctcttggaagaaccgttgttcttatttggtataggtgaccaagtgaagcagctgcaagacgaattgaagcgtttgaattgctttttgaaagatgcagatgagaagcagcatgaaagcgagagagtgcgtaactgggttgcaggcattagagaagcttcttatgatgcagaggatatcctcgaggcatttttcctcaaagcagaatcaaggaaacaaaaagggatgaaaagggtgcttaggaggcttgcttgcatcttgaacgaagcggtttcacttcatagtgttggctcagagattagagagatcacctccaggctttctaagatagcagcaagcatgctagattttggtataaaagaatctatgggcagagaaggtttgagtttgtctgatagtctaagagaacagaggcaatcgtttccatatgttgttgagcataatcttgttgggttagagcagagtctagagaagttggtgaatgatttagtttccggaggtgagaaactaagagtcacgtccatctgcggaatgggtggtttggggaaaacaactttagccaaacagattttccatcaccataaagtgaggcgtcatttcgatagatttgcttgggtatatgtttctcaagactgtagacggagacatgtttggcaagacatttttctgaatctcagctacaaggatgaaaatcagagaatactcagcttgagggatgaacaacttggagaggagttgcatcggttcttgaaaaggaataaatgcctcattgtgcttgatgatatctggggcaaagatgcttgggattgtctgaaacacgtctttccacatgaaacaggaagcgaaataatcctcactactcggaacaaggaagtcgctttatatgctgatcccaggggtgtgcttcatgagccacaattgctaacatgtgaagagagttgggagctgttggagaaaatttcattatctggaagagaaaatatagagccaatgttggtcaagaaaatggaggagattgggaagcagatagttgtaaggtgtggaggtttacctctagctataacagttcttggaggacttctggcaacgaaaagtacatggaacgagtggcaaagagtatgcgagaacatcaaatcatatgtttcaaatggaggtagtagcaatggaagtaagaacatgctagttgcagatgttttgtgcttgagttacgagtacttgcctccccatgtaaagcaatgtttcctctactttgctcattatcctgaagactatgaggttcatgtgggaacactagttagttattgcatcgcagagggaatggttatgcctgtaaaacacacagaggctggcacgacagtggaagatgtcgggcaagattatcttgaggaattagtaaagagaagcatggttatggttgggaggagggacattgtaacttcggaagtcatgacatgccgtatgcatgacctcatgagggaggtgtgtttacagaaggcaaagcaagaaagctttgtgcaagttattgattcaagggatcaagatgaagctgaggcttttatatctctttcgaccaatacatctcgtagaatttctgtccaactacatggtggagcagaggagcaccatatcaagagtctgtcgcaggtttccttcagaaagatgaaacttcttcgagttctagatcttgagggagctcaaatcgagggagggaagttgccagacgatgtaggagatctcatccatttgaggaacctgagcgtgagattgacaaacgtgaaggaacttacatcatctattggaaacttaaagttgatgattactctagacttgttcgtgaaagggcaactgtatattccaaaccaactctgggattttcctgttggaaagtgcaatccaagggatcttttagcaatgacaagtcttagaagattgtctatcaatctttcttcgcagaacacagacttcgtggtggtgtcttcactaagtaaagtcttgaaacgtctccgtggcttgacaataaacgttccatgcgaacctatgcttccaccagtagatgtaacacagttggtctctgcatttactaatctctgtgaactggaactgttccttaaactagaaaaactcccaggagaacagagtttctcctctgatcttggtgctctacgtttgtggcaatgcggattagtggatgacccgtttatggttctcgagaagcttccaaacttgaagattctccaactgtttgaaggatcatttgtaggtagtaagctttgttgttccaagaatctagagaatctagaggagtggactgtagaagacggtgccatgatgcgtcttgtcaccgtggagctaaagtgttgtaacaaactgaagtcagttcctgaaggaacgagattcctaaaaaatctacaagaagtagagattgggaacaggacaaaggcatttaaggacaagctaatctctggtggtgaagatttctacaaggttcaacatgtgccttgtgttgtttttgagaactgtgaactttaa

SEQ ID NO: 387 - DNA, 3152 bp, Arabidopsis thaliana
  source 1..3152: mol_type = genomic DNA
agcttttttgtttgtctattagagattagtcaacgtagtgatgacatactgacatctttggattgtttcaaagtttacgtttttactatacattgactagtcttagagattttatattatgcatatagtgacatagacttttcctttcttatctattcctcttctctacctaatctgtgaatctctctctctcactctctctcttttccttgattgtgcagagatgggaggttgtttctctgtttcattgccatgtgatcaagtagtgagtcagttctctcagttgttatgtgtcaggggaagttatattcacaatctctccaagaatctggcttctctgcagaaggccatgcgaatgctcaaggctcggcaatatgatgtgataagaaggttggaaacagaagagtttacagggcgtcaacaaaggctttcccaagttcaggtatggcttactagtgtcctaatcattcaaaaccagtttaatgatctgcttcgtagtaatgaagttgagcttcaaaggttgtgtctttgtggtttctgctccaaagatttgaaattgagctatcgttatgggaaaagagttatcatgatgttgaaggaagttgagagtctcagttctcaaggattctttgatgtggtttctgaggcaactccgtttgctgatgtggatgagatcccttttcaacccacaattgttggtcaggagataatgcttgaaaaggcatggaaccgtctcatggaagatggatccgggattttgggtctgtacggtatggggggagtaggcaaaacgacactactcacgaagatcaacaataagttttctaaaatagatgacagatttgatgttgtgatatgggttgttgtgtctagaagttcaacagtccgtaagatacaaagagacatagcagaaaaggtaggccttgggggaatggagtggagcgagaaaaacgataaccagatagccgttgacatccacaatgtccttaggagacgaaagtttgttttattgttggatgacatatgggagaaagtgaatttaaaagcggttggagtcccgtatccaagcaaagataacggatgcaaggtagcattcactactcgttctcgagatgtgtgtgggcgcatgggggttgatgatccgatggaagttagctgtctacaacccgaagaatcttgggatttgtttcaaatgaaggttgggaaaaatacactgggaagtcacccagacattcccggacttgctagaaaagtcgctaggaaatgtcgtggcctaccattagcactcaatgttatcggtgaagctatggcatgcaaaagaacagtacatgaatggtgtcatgccattgacgttttaacatcatctgccatagatttttcaggtatggaagatgaaattctccatgttttgaagtatagctatgataatttaaatggggagctgatgaaatcctgcttcctctattgctctctgtttcctgaagactatcttattgataaagaggggttggtagactactggataagtgagggattcataaatgaaaaagaaggcagagagaggaatattaaccaaggttatgagataattggtacccttgtccgtgcatgtttgttgttggaggaagaaaggaacaaatcaaacgtgaaaatgcatgatgtggttcgtgagatggctctatggatatcatccgatcttgggaagcaaaaggagaaatgtattgtgcgagctggtgttgggttacgtgaagtaccaaaagtcaaggattggaacactgtgagaaagatttctttgatgaataatgagattgaagagatatttgacagtcacgagtgtgctgcacttacaactctatttctccaaaagaacgacgtggtaaagatctcggctgaattctttcgatgtatgcctcatctggtggttttagatctatcagagaatcagagtcttaatgaattaccagaagaaatatcagagctggcctctttgagatatttcaacttgtcatatacatgtatacatcaactacccgttggtttatggacattgaaaaagctaatacatctgaatctcgaacacatgagcagtcttgggagtatattagggatatcaaatttgtggaatttgaggacattgggactacgagattccagactgttgctagatatgagtttagtgaaggagctgcagctcttagaacatctagaagttataaccctagatatatcatcaagtttggttgcagagccattgttatgctctcaaaggttggtggaatgtataaaagaggtagattttaagtaccttaaggaagaatcagtgagagtattgactttgccaaccatgggtaatctccgcaagctcgggataaaaagatgtggaatgagggagataaagatagagaggacaacttcatcatcgtctcggaacaaaagtcccacaactccatgcttctcaaacctctccagagtctttatagctaaatgccatggtcttaaggatttgacgtggcttttgtttgctcctaatcttacttttcttgaagttgggttctcaaaggaagtagaggatataattagtgaagagaaagctgaggagcattcagctacgattgttccttttaggaaattggagacactacacctgtttgaattacgcgggctcaagagaatctatgcaaaggctctgcattttccgtgtctgaaagttatccacgtagaaaaatgtgaaaagctgagaaagcttccattggattctaaaagtgggatcgcgggtgaagaacttgtcatatattatggagagagagaatggatagaaagggttgaatgggaggaccaagcaactcaactccgtttcttaccttcatccaggtggcggtggagagaaacataatgaacttcactttcttctacaaacttttgttgtcatggtctaaagacatttgccggtgtgtaaatctcttccttgtctcttcttgtttgcataaccgttctcatcgttcttttggttagtgatcattggatttgtacttatctctttctctaaacgatgagtgtttgtttcggcttcatagaaacattacacagagactcatgagaaaatgaataaaaacttgcaagttcctaaccattgtaataaaataataattaac

SEQ ID NO: 388 - DNA, 1159 bp, Arabidopsis thaliana
  source 1..1159: mol_type = genomic DNA
gtttggtttaggcatctgaaatctaccgaaatgggccggtaattagctcatacccaacacgaccagaccagaccgacccgacccgacggctccagattcatccatgtttcatcttcctcatcagatctaattcaatctgcgaatttctcttaaaccctaaccctctcgctgccgtccggtggtttttccgacgacgaactatgacgattcacgctgcagtaatccagaagcttctgaacaccggagcacatctcggccgtcgtgccgccgagcaccatttcaagcaatacgcttacgggacgcgtaacggaatgacaattatcgactccgacaaaaccctaatttgcctccgtagcgccgctcatttcgtcgctaacctcgcccacatgagaggtaacatcttcttcgtcaacacgaatcctctcttcgacgaaatcattgagctcacttctcgtcggatccaaggagattcgtataatcacaaccgtgcgatgaatctgtggaagatgggagggtttttgactaacagctacagtcctaagaagtttcgatctaggcataaaaagctttgctttggtccaactactatgcctgattgtgtcgttgtgtttgattctgagaggaagagctctgtgatacttgaggcatcgaagcttcagattccggttgttgcaattgtggacccgaatgtgccattggagttctttgagaagattacgtatcctgtgccagctcgtgattcggtcaagtttgtgtatttgttctgtaatgtgatcaccaagtgctttgtggcagaacagatgaagttggggatcaaagaagggagcaatgaagatttgatgaaggatttagctgcttgattttgatatttgcaacaaaagtatgaaactttacagttgtttttctgagtctggaataattgttcttcagaattgtggttacttcaactttgaaattctgggagttttttacacatggatgattttgtttctctgatggatatttctgtataagattgttgagttctagtgttctacatcttgataactgccttgtcttttccttgcacaactcattttttggaaatgctttagacattgtatatggtaatcgttacttcacaagttttggaatgagctatttacaagtaactgtctgg

SEQ ID NO: 389 - DNA, 3126 bp, Arabidopsis thaliana
  source 1..3126: mol_type = genomic DNA
caatgataagattctaaagtagattgagacaagtttcgtagtcggcagcagtaaccaagaaaacgagtaaggttgactcttgacttgttaaaccattgacttcaatttcgataaagtctctatgtaagctcatttttctgaaacaagttttgctaaaaaaatccaaagatctgaagcttcagatccttctcggctaaggctaagtcacaaccttgtaagtttactttactttggttagatttgtttcaatgttctaggattctacatgtttcttgagaagatatggattagttaaagaataatccaatcttttggttattgagattctatagtcgttggttgattgatttttggaaagttcaatctagtgatgatacacataaccgattgaattattgcttggttatagtttaccaattagagatatttcttgaagttgcagggtctgagtaaatggtggacgctgttgtaacagtgtttttagagaaaaccttgaacatcctcgaagaaaaaggccgaaccgtatcggactaccgaaaacagttggaagatttgcaaagcgaattgaaatatatgcagtcttttctcaaggatgcagagaggcagaagagaactaatgaaacgttgcgtactcttgttgcggatttacgagaactggtttacgaagctgaggatatacttgtggattgtcagctcgcggatggtgatgatgggaacgagcaaaggtcatcaaatgcgtggctttcgcggcttcatcctgcccgggttccgttgcagtacaagaaaagcaaacgtttgcaagagatcaatgagaggataacgaaaataaagagtcaagtagagccttatttcgaattcataacgccgagtaatgttggaagagataatggaactgatcggtggagctctccggtgtatgatcatactcaggtggttggtttggaaggagataaaagaaaaatcaaggagtggctctttcgatcaaacgacagccagcttttgataatggcctttgttgggatgggagggctaggtaaaactacaatcgctcaagaagtgttcaatgacaaagagatcgaacatcgtttcgaaagaaggatatgggtgtctgtgtcccagacttttactgaagaacagatcatgagaagcatattgaggaacttgggggacgcgagtgttggagatgatattggaacattgctgagaaaaatccagcagtatcttttggggaaaaggtacttgatagttatggacgatgtatgggacaagaatttgagctggtgggacaagatctaccaaggactgcctagaggacaaggaggtagcgttatcgtgaccacaaggtcggaatctgtagcgaaaagggtgcaagcgagagacgacaagactcaccgtccagagctccttagtcctgataacagttggctgctgttttgtaatgtggcatttgcagcaaatgacggtacttgtgagcgtcccgagctagaggatgttggcaaggagattgtaacgaaatgcaaaggtttgcctttgacaatcaaagcggttggtgggttacttctgtgcaaagaccatgtctatcatgaatggagacgaattgcagagcattttcaggatgagctaagaggaaacacttctgaaactgacaatgttatgtcttctctgcagttgagctacgatgaactcccttcccaccttaagtcgtgcattctcacgctttcgctctatccagaagactgtgttataccaaaacaacaactagtacatggatggatcggagaaggttttgtcatgtggagaaacggaagatctgcaactgaatctggagaagactgcttttccgggctcacaaacaggtgtctaatagaagttgtagacaaaacctatagcggaaccatcatcacttgcaagattcatgacatggttcgtgatttggtgatcgatatagccaagaaggattcgttctctaacccggaaggcctcaactgtcgtcaccttgggattagtggaaactttgatgagaagcagatcaaagttaaccataagctgagaggcgtagtgtcaacaactaagacaggtgaagtgaacaagctcaactcagacttagctaagaaattcacagactgcaaatatcttcgggttctcgatatctcgaaatccatatttgatgctcctctgtctgagattttggatgagattgcaagccttcaacacttagcatgtcttagtttgagcaacacacatccgttgatccagtttcctcgttccatggaagatctccacaaccttcagattctagacgcaagctactgtcagaatctgaaacaacttcaaccttgcatcgtcttgttcaagaaactccttgtacttgacatgacgaactgtggatcccttgaatgcttccccaagggtatcggaagtctcgtgaagctcgaagttctgttgggatttaagccagccaggtccaacaatgggtgcaagctcagtgaagtgaaaaatctcacaaaccttcggaaacttggtctttctctgactcgtggcgatcagatagaagaggaggagcttgattctttgataaacctaagcaagctgatgtccatttcgatcaactgctatgatagctacggcgatgatctcataaccaaaatagacgcccttactcctccacaccagctccatgagctttctctacaattctatcctggaaagtcgagtccatcgtggttgagtcctcacaagcttccgatgttgaggtacatgtcaatatgttcaggtaatttggtgaaaatgcaggaaccattctggggaaacgagaatactcactggagaattgaaggtttaatgttaagttcattgtcggacctagacatggactgggaagtgctgcaacagtcaatgccgtacctgaggaccgtgaccgcaaactggtgtccagagctagagtctttcgcgattgaagatgttggctttagaggcggagtgtggatgaaaacaccattgcacagaacctgatgaaacgttttaagcaactagatcaatgtttattaaacagtgacaataagttggtgtattacatataccttgatacaatgtaatgttgctttgaccgtttggatttcatatcgc

SEQ ID NO: 390 - DNA, 1170 bp, Arabidopsis thaliana
  source 1..1170: mol_type = genomic DNA
gaaaacggcccatataaatccaccaaacgaatcttctctcttggtataaatatgctgtcttgcgttacagagaaaccctagacgtcgaagatgaagttcaacgttgcgaatccaactactggatgccagaagaagctcgagatcgacgatgaccagaaactacgtgcgttttacgacaagagaatctctcaagaagtcagtggagatgctttgggcgaggagttcaaaggatacgttttcaagatcaagggtggttgcgataagcaaggtttcccaatgaagcagggagttttgactccaggccgtgttcgccttttgcttcaccgaggaactccttgcttcagaggacatggaaggagaactggtgagaggagaagaaagtctgttcgtggttgcattgtgagccctgatctctctgttctgaaccttgtcattgtgaagaagggtgagaacgatcttcctgggcttaccgatactgagaagccaagaatgagaggaccaaagagagcctccaagatccgtaaactgtttaacctcaagaaggaagatgatgtcaggacctatgtcaacacttaccgccgcaagttcacaaacaagaagggcaaggaagttagcaaagcccctaagatccagaggcttgtgaccccattgactcttcagaggaagagagctagaattgctgacaagaagaagaaaattgctaaggctaattctgatgctgctgattaccagaagcttctcgcctcgaggttgaaggaacagcgtgacaggaggagtgagagtttggcaaagaagaggtcgagactctcttctgctgctgccaagccctctgtcacagcttaaaaaagcttgagaatcaaatcaaagatgtcacctttctagttttgttctcttttcttctccggctattaaaaagttagttcgagttcatattcagctgtttttgttccaagacatgggtacacaatcgctttgggcttgtttcatgatttatgcttttagttgaagaccattttaaactcaatttttattgcttatctttctcagtttttgatcaaagcgtttctccattgaaaaccattttaatcacctgtttcaatcatacataatgttaaacacatgtactggcgattacaataggtatatattttgactgaaatttatggagca

SEQ ID NO: 391 - DNA, 3147 bp, Arabidopsis thaliana
  source 1..3147: mol_type = genomic DNA
aatggagttgccatggaggttgaggtaatttgtagctcgaatgcatctgatcatgcagttagtatagataatctgtggatattttgcaatattcgtagggaaaaggaaccaaaaatccatcaagttgtaagtgtttagcaaatatctacaagacttcatcttttgtgctttctcttaaatgtatccgatttttttttgcatttgaaagttctacaatattattagagtagtgggaaatgtcataatcgtggaaaagtataaatattttcaataatgcatacagtaatcattgattccctttgtgtggttgaaattctattctatacatctttaaattcgatatagtaatcatttattccctatctcttcttttcatcattttgaataattgtcactcactcaatttggtttcttgttttgctctctagatctctcttttctctcttctttccatctccagcaatgggagcttgtttaacactctcgttctcttgtgatgaagttgtgaatcaaatctctcaaggtttatgcatcaacgtgggttatatttgcgagctctccaagaatgtagtggctatgaagaaagacatggaagtgctgaagaaaaagcgagatgatgtgaaaagaagggtagatatagaagagttcacaaggcgtcgtgaaaggctttctcaagtccaaggatggcttacgaatgtctcgaccgtcgagaataaattcaatgaactgcttaccactaatgacgctgagcttcaaaggttgtgtctctttggattttgctctaaaaatgtgaaaatgagctatctttatgggaaaagggttgtcctgatgttgaaggagattgagagtcttagttctcaaggagattttgatactgtgactttagccactccaatagctaggattgaagagatgcctattcaacctacaatcgtaggtcaggaaacaatgctcgaaagggtatggacccgtctcacagaagacggagacgagattgtgggtctttatggcatgggtggagtaggcaaaaccacccttctcacacgaatcaacaacaagttttctgaaaaatgtagcgggtttggggttgtgatatgggtggtggtgtctaagagtccagatatccataggattcaaggagacatcgggaagagactagaccttggaggcgaagagtgggataatgtaaatgaaaaccagagagcccttgacatatacaatgtccttgggaaacaaaaatttgtgttgttgttggatgatatatgggagaaagtgaatttagaagtgcttggagtcccttatccaagcagacaaaatggatgcaaagtagtattcaccactcgttctagagatgtttgtgggcgtatgcgggttgatgacccgatggaagtcagttgcctagaacccaacgaagcctgggaattgttccaaatgaaagttggagaaaacacattgaaaggccatccagacattcctgaacttgcaagaaaagttgctggaaaatgttgtggcctaccattggcacttaatgtcattggcgagaccatggcatgcaaaaggatggtacaagaatggcgtaacgcaattgacgttttgagctcatatgctgcagaattccctggtatggaacaaattcttcctattctaaagtatagctatgataatttaaacaaggagcaggtgaaaccatgtttcctatattgctctctgtttcctgaagattatcgtatggaaaaagagaggttgatagactattggatatgtgagggattcatagatgaaaatgaaagtagagaaagagcattaagccaaggttatgagatcattggtatccttgtccgagcatgtttgttgttggaggaagctatcaataaagaacaagttaaaatgcatgatgtggttcgggagatggctctatggattgcatctgatcttggggaacataaagaaagatgtattgtgcaagtcggtgttggattacgtgaggtaccgaaagtcaagaactggagttctgtgagaaggatgtcgctgatggaaaatgagattgaaattttatctggcagtcccgaatgcctggaacttacaactctgttccttcagaaaaatgattcattgctacatatctcggatgaattcttccggtgtatcccaatgctagttgttttggatctatcagggaattcaagtctccggaaattgcctaaccaaatatcaaagttagtctccttgcgttatcttgacttgtcgtggacatacattaagcggctacctgtcggtctacaagagttgaaaaagctcagatatttgagattggattacatgaagagacttaagagtatttcagggatatcaaatatatcaagtttgaggaaattgcaacttttacagtctaaaatgtcgctagacatgagcttagtggaggagttgcagctattagaacatttagaagttctaaacataagtatcaagtcaagcttggtagtggagaagttgttaaatgctcccaggttggtgaaatgtcttcaaatcttagtacttagaggagttcaggaagaatcatccggagtattgactttgccagatatggataatctcaataaagtcatcataaggaagtgtggaatgtgtgagataaagatagagaggaaaactttatcattatcatcgaacagaagtcccaaaactcaattcctccataacctctccactgtgcatataagtagctgtgatggtctgaaggatttgacgtggttgttgttcgctcctaacctcactagtctcgaggttctggactcggaactagtagaaggaataataaaccaagagaaagctatgactatgagtggtatcattcctttccagaaactagagagtctacgcctacacaatctagcgatgttgaggagcatctactggcaacctctgtcttttccatgtctgaagacaattcacataacgaagtgtcctgagctgagaaagcttccattggattctgaaattgccataagggatgaagaacttgtcattaagtaccaagaggaagaatggcttgaaagggttgaatgggacaacgaagccacaagactccgtttcttaccttttttcaagttctttggacctgaatggcaagttagttatgtgcggtag

SEQ ID NO: 392 - DNA, 3034 bp, Arabidopsis thaliana
  source 1..3034: mol_type = genomic DNA
caaaaaaacaaagaaggattataagctatacttacttttcagcttctctcatggaagaatcttcatctttgtcattgcagtcttgcaattggagacaccatgtgtttccaagcttcagcggcaaagatgtccgcagaacctttctcagccaccttctcaaggagttccggcgtaagggaatccgtactttcatagataatgatatcaagagaagccaaatgatcagttctgagcttgtacgagctatcagagaatctaggattgcggttgtagtgttgtcgcggacctatgcatcttcaagctggtgtttgaatgagttggtggagataaagaaagtaagccagatgatcatgccggttttctacgaggtggatccatctgatgtgaggaaacgaacgggagaatttggaaaggcgtttgaggaagcatgtgaaagacaaccagatgaggaagtgaagcagaaatggagagaagcattggtctatatagctaatatagccggcgagtcttctcaaaactgggacaatgaagcagatctgattgacaagattgctatgagcatttcatatgaattgaattctacattatcacgagattcctacaatctggttggaatcgacaatcatatgagagagctggattctttgttatgtctggaatcaactgaagtgaaaatggtggggatttggggtcctgcaggtattggcaagacaacaattgccagagctttattcaaccggctatctgaaaacttccaacacactatttttatggagaatgttaagggaagttctaggacctcggagctcgatgcctatggcttccagttgcgtttgcaagaacagtttctgtctgaagttattgatcataagcatatgaagatacatgatttaggtttggtaaaagaaagattgcaggatctgaaagttcttgttgttcttgatgatgttgataaactagaacaacttgatgccttagtgaaacaatctcagtggtttggttctggaagtaggatcattgtgaccacggaaaacaaacagctattgagagcgcatgggatcacttgcatatatgagttgggttttccatctagaagtgattctcttcagattttctgccaatatgcatttggagagagttctgcaccagatggttgtatcgagcttgctactgaaataacaaagcttgctggctatcttcccctagctctaaaggttttggggtcctctctgcgagggatgagcaaagatgagcaaaaatcagcattgcctcgactcagaaccagtcttaatgaggatattagaaatgttttacgagtcggttatgatggtatacatgacaaggataaggtcatattccttcatattgcttgtttattcaatggtgagaacgttgattatgtgaagcaaatacttgcaagttctggcttggatgtcacatttgggcttcaagtccttaccagtaggtctctcatacacatatcgagatgcaatcgtactattacgatgcacaatttgctagaacaattgggtcgagaaattgtttgcgaacaatctattgccgagcctggcaaacgtcaattcttgatggatgcttcagagatttatgatgtacttgctgataacactggtactggagctgttttgggcatatctttggacatatctaagatcaatgagttgtttctgaatgaaagagcttttggtgggatgcataatctgttgtttctaagattctacaagtcctcttcgagtaaagatcaacctgagcttcatttacctcgaggcttggattatttaccccgtaaacttaggctgctgcattgggatgcattccccatgacatcaatgcctctgagtttttgtccacagtttcttgttgtgataaacataagggagagccagcttgagaagctgtgggaaggaacacaacctcttagaagtctaaagcagatggatttaagtaagtctgagaatctaaaagagattcctgatctttcgaaagcggtaaatatcgaggaactctgtctcagttattgtggaagtttggtgatgttaccttcctcgatcaagaacctcaacaaattggttgttcttgacatgaagtattgctcaaagctagagattatcccctgcaatatggacttagagtcccttagcatcctcaatcttgatggatgctcacgattggagagttttccagaaatttcttcgaagattggatttctctctctgtcagaaactgcaatagaagaaattcccacaacagtcgcgtcttggccatgtctggcagcattggacatgtcaggctgcaagaacctcaagacgtttccatgtcttccaaaaactatagaatggttggatttgagcaggacagagatcgaagaagttcctttgtggatcgataaactctcaaagctcaataaactattgatgaacagctgcatgaagctaagaagcatctcttctgggatctctacgctggaacatatcaaaacactagattttttggggtgcaagaatattgtgagctttcctgtagagatattcgagagctctcggttctgtcataatctggtgatggagatgagaaacattcaaaaccctgatcttcctcgaccattttatttcaagaacaactatattgacactattccagattgtattacacgtcactgcaagctgccttttctgaattcatcaggatcaatctccagcaagatagagaatgatttcatctggttcgataaataaatatcagtgaagaattgcatgataatgatgagtcagatggagtttcatcttcaaaccctgctcattacaattgtaagtgacatcatttgacttttcccctgtggacccatctttgggcactgcaagtgttccagaccatatagttcaacatctctgaaactgagaatgaaatccgtgtacgttgggcacgttattattgttgaaatgtaggttcttgtaagatatagcttatagacaattgtttgtatatccgtgtacgttgggcacgttattattgttga

SEQ ID NO: 393 - DNA, 3099 bp, Capsicum chacoense
  source 1..3099: mol_type = genomic DNA
caaatatttcttggagtgaatttgaagttgtattatctgcaattgaatggttggtcatagtcgcaaaggacaaaaacgagaatacagtatatatggctcatgcaagtgtggcttctcttatgagaacaatagaatctctcttgacattcaattcgccgatgcaatctctatcctgtgatcacagagaagaactttgcgctcttcgtgaaaaagttagttccctggaagtatttgtcaagaactttgagaaaaacaatgtttttggggaaatgacggattttgaagtagaggtaagagaagttgcaagtgctgctgaatacacaattcaactgagactaacaggaactgtactgggagaaaataaaagccagaaaaaaaaggcgcgtcgaaggtttcgtcaaagcctgcaacaagtagcagaggacatggatcatatctggaaagagtcgacaaagatccaagataaaggaaaacaagtatcaaaggaatcattggttcatgatttttcaagttcaacaaacgatattttgaaggttaagaacaatatggttggacgtgatgatcaaaggaaacagttgttagaagatctgactagaagctactctggggaacccaaagtcatcccgattgtcgggatgggaggcataggtaaaacaaccttagcaaaagaagtttacaatgatgaatcaattctatgccgttttgatgttcatgcctgggctaccatatctcaacagcacaacaaaaaggaaattttgctgggccttctgcattccacaatcaaaatggatgacagggttaagatgattggtgaagcagagctagcagacatgttacagaaaagtttaaagagaaagaggtacttaattgtcttggatgatatctggagttgtgaagtgtgggatggcgtgagacgatgctttccaactgaagacaatgcagggagtcgaatactgttgactacccgtaatgatgaagtagcttgttatgctggtgtagagaatttttctttgcggatgagcttcatggatcaagatgagagttggagtcttttcaaaagtgcagcattttcaagtgaagcattaccatatgagttcgagactgttggaaagcaaatcgcagatgaatgtcacgggttaccactaactattgtcgtggttgcagggcttctcaaatctaaaaggacaatagaagattggaaaactgttgctaaagatgtcaagtcattcgtcacaaatgatcctgatgaacgatgttcacgtgtgcttgggttgagttacgatcacttgacaagcgatctaaaaacatgtcttctgcatttcggaatttttccagaagacagtgatattccagtgaagaatttgatgagatcatggatggctgaggggttcctgaagttggaaaatgatttggaaggagaggttgagaagtgtttgcaagagcttgtcgatagatgtctagtcctcgtcagcaagagaagtcgagatggaacaaaaattagatcatgtaaggttcatgatctaatatatgacctgtgcgtgagagaagttcaaagggagaacatttttatcatgaacgacattgttcttgacgtatcatatccagaatgttcatatctctgtatgtataaaatgcagccctttaagcgcgtgactggtgatgaaattaattattgtccctatggtctttatagggctcttcttacccctgtaaatcgtcagttgagagatcatgacaacaacaatcttttgaaacgaacccattctgttttctcttttcatcttgagcctttatattatgttctcaaatcagaggttgttcatttcaaattactcaaagtcttggagctgagacacagacagattgatggtttccctcgagagatactaagcctcatctggttgaggtacctatcattgttcagctatgggaatttcgatgtacctccagaaatttgcaggttatggaatctgcagacattcattgttcaacggtttcgatcagatataataatttttgctgaggaaatttgggaactaatgcaattaaggcatcttaaactgcccagattttatttgccagattgcccaagtggatctgttgacaaaggaaggcacttggatttttcaaacttacaaactatttcttacttgtctccacgttgttgcacgaaggaggttattatggggattcagaatgtcaaaaaattaggaatcagtggaaataaggatgactataaaagttttcgggactctgggcttcccaacaatcttgtctatctgcagcaacttgaaatattgagtcttatatctgttgattatagccttttgccagtgatcatttcaagtgcaaaagcttttccagcaacgctcaagaagttgaagttggaaagaacttatctaagctggtcatacttggacatcatagctgagttgcctaaccttgaggtgctgaagctgatggatgacgcttgttgtggtgaagaatggcatccaattgttatgggatttaatcgattgaagcttttgctaattaaatatagttttctcaagttctggaaagccacaaatgacaattttcctgtccttgagcgcctcatgattagaagttgcaaaaatttgaaagagatacccattgagtttgcagatatacacacactacagctgattgagttaagagagtgtcctcccaaacttggggaatctgctgcacgaattcagaaagaacaagaagacctcggaaacaaccctgtggatgttcgtatctcaaatccattgaaggagagtgattctgattcagaagaacattaggaaaggatctcaaggccagaaggattgaactcttgggatttcatttcggccctctatcacaaaataccactaaattatcggtttcaagcaatgtgtgacttccaaggagatgtgatatcttttgtgttgtaacatatttttgagttgtactgattcccttcttcccttctctttttatgtaactttactaattcaacttcaagtactagcagaccacatggttgattgtgatcgagtttgatgattattttatacgatgagacaaccagtttagttttaaaaaaaaaaa

SEQ ID NO: 394 - DNA, 4010 bp, Glycine max
  source 1..4010: mol_type = genomic DNA
aatacagctgttaaagtttgtcttgttgggaacactcaacagttattggttgactcaatcttaattaaagccatccttcataaaattgcctatcactgatttgatcagttcatgaaccctgcactgcacttcaaattactcattttcattcatccactcaactccctttcctaccatggcactagaattggttggtggtgctcttctttctgctttccttcaggttgcgtttgagaagcttgcttctcctcaagttctggacttctttcgtggaagaaagcttgatcaaaagctgctcaacaacttggaaatcaagctgaactccatacaggctctggctaatgatgcagaactaaagcagttcagagatccacttgtcagaaactggcttcttaaggtcaaagatgctgtgtttgacgcagaggatatcttggatgaaatacaacatgagatctccaaatgccaggtcgaagctgaagctgaagctgagtctcaaacctgcacttgcaaggtaccaaatttcttcaaatcttctcctgctagttcctttaacagggaaattaaatccaggatggaagaaatccttgatagattagatcttctctcaagccaaaaggatgatctaggcttgaaaaattctagtggtgttggcgttggatcagaattgggtagtgcagtaccacagatatcacaatcaacatcttcagttgttgaaagtgatatttatggcagagataaagacaaaaaaatgatttttgattggctgacatctgacaatggcaatcctaaccagccatcgatactttctattgtgggcatgggtgggatgggtaagaccacacttgctcaacatgtattcaatgaccctaggatcgaggaggctagatttgatgtcaaagcttgggtctgtgtttcagatgattttgatgctttcagggtaacaagaacaattcttgaggccatcactaaatcgactgatgatagtagagacctagagatggttcacggaagattgaaagaaaaattgacggggaagagatttcttcttgttttggatgacgtttggaacgaaaaccgacttaaatgggaagctgtgctaaaacatcttggttttggggctcaggggagtagaattattgccaccacacgtagtaaggaagttgcttctaccatgaggtcaaaagaacacctcctggagcaattacaagaagatcattgctggaagttgtttgctaaacatgcattccaagatgataatattcaaccaaatccagattgcaaggagattggtatgaagatagttgaaaaatgtaaaggacttcctctggccttgaaaacaatgggaagtctattacacaacaagtcatctgttacggaatggaaaagcatattgcagagcgagatatgggaattttcaacagagcgtagtgatattgtacctgctttagcactaagctatcaccatcttccttctcatctcaagagatgttttgcttattgtgccttattccccaaagattatgagtttgataaggagtgcttaatacaattgtggatggctgaaaaatttctacaatgttctcaacagggtaagagtccaggagaagttggtgaacaatacttcaatgatctattatcaaggtgcttctttcaacaatcaagcaacacagagagaacagattttgtcatgcatgaccttctcaacgatttggcaagatttatttgtggggacatttgtttcagattggatgggaatcaaacaaaaggtacaccaaaagcaacccgtcattttttaattgacgttaaatgttttgatgggtttggaactctatgtgacacaaaaaagttacgtacttatatgccaacaagttacaaatattgggattgcgagatgtcaatacacgaattgttctccaagtttaattacttacgtgtcttatctctgtttgattgtcatgacctaagagaggtgcctgactctgtgggtaatctcaaatatctccgttcgttagacttatccaatactaaaatagaaaaactacctgaatcaatatgttcactctacaacttgcaaatactgaagctaaatggttgtagacatttgaaggagctgccctcaaatttgcataaactcactgatttgcatcggcttgaattaatagaaactggagtgagaaaggtaccagcacatttgggaaaactggagtatcttcaagtattaatgagttcgtttaatgttggcaaaagtagggagttcagtatccagcagttaggagaactcaatcttcatggaagtctatcaataaggcaactgcagaatgttgagaatccatcagatgcattagcggtggatttaaaaaataaaacacaccttgtcgaggtagagttagaatgggattcagactggaaccctgatgattcaacaaaagaaagggatgtaatcgagaatctacagccttccaaacacttggagaagttgaggatgaggaactatgggggtactcaatttccaaggtggttattcaacaattcatcatgtagtgtggtgtccttaaccttgaagaactgtaaatattgcctatgtttgcctccccttggacttttgccatctctgaaggaactttcaattaaagggcttgatgggatcgtgagtatcaatgctgattttttcgggagtagctcttgttcatttacatccttgaaatctttggagttctaccatatgaaggaatgggaagaatgggaatgtaaaggtgtgacaggtgcttttccacgtcttcaacgtctttctatagagcgttgtcccaagctgaaagggcacttgccagagcaactatgtcatttaaattctctaaagatttctgggtgtgaacaacttgtaccttctgctctcagtgcccctgatattcataaattatacctaggagactgtggagagctgcaaattgatcatgggacaactttgaaagagcttaccattgaaggtcacaacgtggaggcagccttattcgaagagattgggcgcaattactcttgttcaaataacaatattcccatgcacagttgctatgatttccttgtaagcttgcgcatcaaaggtggctgcgactctttaacgacctttccgctagatatgttcacaatactcagggaactttgtatctggaagtgtcctaatctacggaggatttcacaagggcaggctcataatcatctccagactctggatatcaaagagtgcccccaattagaatcattgcctgaaggaatgcatgtcctccttccatctcttgattctctgtgcatagatgattgtccaaaagttgaaatgtttcccgaaggaggtttgccatcaaatttaaaagaaatgggtctctttggtggtagttacaaacttatctccttattgaaaagtgccttgggaggcaatcactctctagaacggttagttattggaaaagtggattttgagtgtcttcctgaggaaggtgtactgccacactctcttgtttctctacagatcaatagctgtggagatcttaaaagactggactacaaaggtatctgccacctctcctctctcaaggaattgagtcttgaagactgccccaggctccaatgcttaccagaggagggtctgcccaaatccatttcaactttgtggatttggggggactgtcagttgctcaaacaacgttgccgggaacccgaaggcgaagactggccaaagattgctcacttttgcccgttgctcaatcaacgttgccgggaacccggaggcgaagactggccaaagattgctgacattgaaaacgtgtatataaggtagtgaggttgattataaagaataatggtgaaagatgtagatgcttctctattgcctgcaatttactaaataattgttttctaaacttatttttgctttctgcttgctggacgccgccgctcagttatttattattcgacaaaataattgtttaatatagtttcaagtgattgattctgcttgg

SEQ ID NO: 395 - DNA, 3639 bp, Glycine max
  source 1..3639: mol_type = genomic DNA
atggcagtagaattaattgctggtgctcttctttcttctttccttcaggttgcattcgaaaagcttgcttctcctcaagttctccacttctttcacggaaaaaaacttgatgagacgcttctgagaaagttgaaaattaagctgctgtccatcgatgctctggctgatgatgctgaacgaaagcagttcgcagatccacgcgtgagaaactggcttcttgaggtcaaagatatggtttttgatgcagaggatctcttggatgaaatgcaatatgaattctccaaatgggaactggaagctgaatctgaatctcagacctgtaccggctgtacttgcaaggtaccaaatttcttcaaatcttctcctgctagttcctttaacagggaaattaaatccaggatggaaaaaatccttgatagcttagaatttctctcaagccaaaaggatgatctaggattgaaaaatgctagtggtgttggcgttggatcagaattgggtagtgcagtaccacagatatcacaatcaacatcttcggtggttgaaagtgatatttatggcagagataaagacaaaaaaatgatttttgattggctgacatctgacaatggcaatcctaaccagccatcgatactttctattgtgggcatgggtgggatgggtaagaccacacttgctcaacatgtattcaatgaccctaggatccaggaggctagatttgatgtcaaagcttgggtctgtgtttcagatgattttgatgctttcagggtaacaagaacaattcttgaggccatcactaaatcgactgatgatagtagagacctagagatggttcacggaagattgaaagaaaaattgacggggaagagatttcttcttgttttggataacgtttggaacgaaaaccgacttaaatgggaagctgtgctaaaacatcttgtttttggggctcaggggagtagaattattgccaccacacgtagtaaggaagttgcttctaccatgaggtcaagagaacacctcctggagcaattacaagaagatcattgctggaagttgtttgctaaacatgcattccaagatgataatattcaaccaaatccagattgcaaggagattggtacgaagatagttgaaaaatgtaaaggacttcctctggccttgaaaacaatgggaagtctattacacgacaagtcatctgttacggaatggaaaagcatattgcagagcgagatatgggaattttcaacagagcgtagtgatattgtacctgctttagcactaagctatcaccatcttccttctcatctcaagagatgttttgcttattgtgccttattccccaaagattatgtgtttgataaggagtgcttaatacaattgtggatggctgaaaaatttctacaatgttctcaacagggtaagagtccagaagaagttggtgaacaatacttcaatgatctattatcaaggtgcttctttcaacaatcaagcaacacaaagagaacacattttgtcatgcatgaccttctcaacgatttggcaagatttatttgtggggacatttgtttcagattggatggtgatcaaacaaaaggtacaccaaaagcaccccgtcacttttcagttgcaatcgaacacgttcgatactttgatgggtttggaactctatgtgatgcaaaaaagttacgttcatatatgccaacaagtaacaaaaagatttttgattacttctcttcttgggatcgcaatatgtcgatacatgaactggtctccaagtttaagttcttacgtgtcttatctttatctcattgttctaacctaagcgaggtgcctgactctgtgggtaatcttaaatatctcagttcgttagacttatccaatactgaaatagtaaaactacctgaatcaatatgttcactctacaacttgcaaatactgaagctgaattattgtaaacaattggacgagctgccctcaaatttgcataaactcactgatttgcatcgccttgaattaatagatactggagtgagaaaggtaccagcacatttgggaaaactgaagtatcttcaggtatcaatgagtccgtttaaggttggcaaaagtagggagttcagtatccagcagctaggagaactcaatcttcatggaagtctatcaattcagaacctgcagaatgtcgagagtccctcggatgcattagcagtggatttgaaaaataaaacacaccttctggaggtagagttagaatgggattcagactggaaccctgatgattcaacaaaagaaagggatgaaattgtaatcgagaatctacagcctcccaaacacttggagaagttgaggatgaggaactatgggggtaaacaatttccaaggtggttattaaacaattcattattgaatgtggtgtccttaaccttggagaactgtcaatcttgccaacgtttgcctccccttggacttttgccatttctgaaggagctctcaattcaagggcttgcagggattgtgagtattaatgctgattttttcgggagtagctcttgttcatttacgtccttggaatctttgatgttccacagtatgaaggaatgggaagaatgggaatgtaaaggtgtgacaggtgcttttccacgtcttcaacgtctttctatagagtattgtcccaagctgaaggggcacttgccagagcaactatgtcatttaaatgatctaaagatttatgggtgcgaacaacttgtaccttctgctctcagtgcccctgatattcatcaattatccctaggagactgtggaaagctgcaaattgctcatccgacaactttgaaagagcttaccattacaggtcacaacgtggaggcagccttactcgaacagattggacgcagttactcttgttcaaataacaatattcccatgcacagttgctatgatttccttgtaaggttggtcatcaatggtggctgcgactctctaacgaccattccactagatatgttcccaaaactcagggggcttgatatcgggaagtgtcctaacctacagaggatttcacaggggcaggctcataatcatctccagagtctgtatatcaaagagtgcccccaattagaatcattgcctgaaggaatgcatgtcctccttccatctcttcattatctgagcataagggattgtccaaaagttgaaatgtttcccgaaggaggtttgccatcaaatttaaaaggtatgagactccatggtagttacaaacttatgtcctcattgaaaagtgccttgggaggcaatcactctctaattagcttatatattggaggagtggatgttgagtgtcttcctgacgaaggtgtactgccacactctcttgtttctctatggatcagtgactgtgaagatcttaagagactggactacaaaggtctctgccacctctcctctctcaagaacttgtttctttatgactgccccaggctccaatgcttaccagaggagggtctgcccgaatccatgttatctttgcacatttacgattgtccgttgctcatacaacgttgccgggaacccgaaggcgaagactggccaaagattgctcacattgattataaagaatttaatggtgaggttgattataaataa

SEQ ID NO: 396 - DNA, 3306 bp, Hordeum vulgare
  source 1..3306: mol_type = genomic DNA
atggtgagcgccttggcaggggtgatgacctctgtcatcggcaagctcaccgccctgctcggggaggagtacgcaaagctgaaaggtgtgcacagggaggtggagttcatgaaagatgagctgagcagcatgaacgcgctccttcagaggctggcagaggcggaccgtgatcttgatgtgcagacgaaggaatggagggaccaagttcgggagatgtcttacgacattgaggattgcatagacgactttatgaaaagccttggccaaactgacagtgctcagacagcagggcttgtgcaaagtgtggtccagcagctcaaggcgctgagggcgcgccatcaaatatccagcaaaatccaggggctcaaggcacgtgttgaagatgcaagcaagcgacgtatgaggtataagcttgatgagcgcaccttcgagcctagcatctcaagggctatcgaccctcgtttgccttcactctatgctgagcctgatgggcttgtcggtattgacaagccaagagacgagctcattaagtgcctaatggaggggatgggtgcatcagtgcagcagcaaaaggtgttatctattgtgggtcctgggggtctcggtaaaactacacttgccaatgaggtgtaccgtaaactggaaggccagttccagtgtcgagcttttgtttccttgtcacaacaaccagatgtgaataagatcttaagaaatatactctctcaagtctgccagcaagagcttcctagcacaagtgtacaggacgagggaaaactcattgacgcaatcagagaagttttaaagaacaagaggtacattcaccaactttgaattagttggctgttggtactgcatcattttttcttcagcattgatgcttatttagtagcctagccattctactatagtctactgttgtttaattaaattaaatatagatgattttgtttcattttaagcatatatatgcaattgtgaatagtgctttgattcacagttcatgaggttatctatctaaagggctcaaaagacttcctttaaatatcgtaaccccctatgataaattcaactttttgtggtgtggccaaaccattggggaaggggataatggctgtctgtaatagtaatatatagaagagaaatgattctgtccccataaacagtgaatttcaagaaacctgaagccctatatcattctcatgatttactaacatttgacgacaaggaaacatgccattttatttatttgttcacatattttccttattcatgagatttgcaaaacatgcactttgcaggtacttagttgttattgatgatatatggagtactcaagcatggaagattatcaaatgttctttgtttctgaatgacctgggaagcagaataatgacgacaacacgtagtattgatatagccaagtcatgttgctctcggcgccatgatcgtgtctatgaaataatgcctctgacgacagccaactctaagggtttattttttaaacgaatatttggctcagaagatatatgtcctcctcaattggaagaaatctcctcggaaatattaaaaaaatgtggtggttcaccattagcgattcttacaatagcaagtttattggccaataaagatagcacaaatgaagaatggaagtgggtgtataattcgatcggttcgacactgggaaaggaccccggtgtagaagagatgagaaggatactatctcttagctacgatgatcttcctcaccatttgaagacatgtttattgtatctgagtatatttccggaggactatgagattgagagggatcgattgataaggaggtggatcgctgaaggattcattgatacagatggtggacgagatttggaggaaataggagagtgttattttaatgatcttatcaatagaagtatgcttgagccagtgaaaatccaatatgacggtcaagtcgtttcatgccgagtgcatgatatgattctggatctccttgcatctaagtcaattgaagaaaactttgccaccttctctggtaaccaaaatgagatattagtccttcggcataagatccgtaggctatctctcaattattatgccctagagcacaccatgcttccatcaacagcgatcatttctcattgccgttcgctcagtattgtcgggtatgctgaaaagatgccttctctttcgaagtttcgtgttctgcgagtacttgatattgagaatggtgaggagatggagagcaactgttttgagcatctaaggacgcttttccagttgaggtatttgcgactccacgttagaagtatttctgcactccctgagcagttaggagaactacagcatttgaggactctggatatgggctggacaaagatcacaaaaatgcccaaaagcattgttcagctgcaacatttgacatgtttgcgcgtcagtaatttggaattacctgaagggattgggaatctgcaagctctgcaggagctatcagatatcaaagtcaaccggcacagcacggcgtcttgtttgctggagctgggcagtctgaccaaactgaaaatccttgggctacgctggtcaattgtcagtacacacggtaacgaagacacttttgtggataacttggtatcctcgctgcgcaaactgggcagatccagccttcgatccatatgcattcgtagttatcatggctataccatggagttcttactggactcctggttcccctcccctcatctcatgcaaaagtttcagatgggcacgtactacaacttccccagagttcctccttggatcgcgtcgctggacaagctcacatacctagatatcaatatcgatccagtagaagaggaagcactggagatccttggagaattgccttctttgctgtttctctggctgacatcgaaatcggctgctcccaaacagcggctcgtcgtaagcagcagcatgtttgtgcgtctgaaggagctccacttcacctgctggagcaatgggcaaggactgatgtttgaggccggggccatgccgaggctcgagaagctgtgggttccgtttgacgcaggcagcggtcttgattttggcatccagcacctctcttccctcacgcatcttgccgtcgagatcatttgcgtcggcgcgaccgctcgggacgtagaggcgttggaggaggccatcagaggtgcagcccgtctccttccgaaccgccctgcggtggaattccgaacatgggatgatgaaaagatggtggtggaggaggaggaggggcaaggcgtccctgaagaggagatccacgctagcggttga

SEQ ID NO: 397 - DNA, 3306 bp, Hordeum vulgare
  source 1..3306: mol_type = genomic DNA
atggtgagcgccttggcaggggtgatgacctctgtcatcggcaagctcaccgccctgctcggggaggagtacgcaaagctgaaaggtgtgcacagggaggtggagttcatgaaagatgagctgagcagcatgaacgcgctccttcagaggctggcagaggcggaccgtgatcttgatgtgcagacgaaggaatggagggaccaagttcgggagatgtcttacgacattgaggattgcatggacgactttatgaaaagccttggccaaactgacagtgctcagacagcagggcttgtgcaaagtgtggtccagcagctcaaggcgctgagggcgcgccatcaaatatccagcaaaatccaggggctcaaggcacgtgttgaagatgcaagcaagcgacgtatgaggtataagcttgatgagcgcaccttcgagcctagcatctcaagggctatcaaccctcgtttgccttcactctatgctgagcctgatgggcttgtcggtattgacaagccaagagacgagctcattaagtgcctaatggaggggatgggtgcatcagtgcagcagcaaaaggtgttatctattgtgggtcctgggggtctcggtaaaactacacttgccaatgaggtgtaccgtaaactggaaggccagttccagtgtcgagcttttgtttccttgtcacaacaaccagatgtgaataagatcttaagaaatatactctctcaagtctgccagcaagagcttcctagcacaagtgtacaggacgagggaaaactcattgacgcaatcagagaagttttaaagaacaagaggtacattcaccaactttgaattagttggctgttggtactgcatcattttttcttcagcattgatgcttatttagtagcctagccattctactatagtctactgttgtttaattaaattaaatatagatgattttgtttcattttaagcatatatatgcaattgtgaatagtgctttgattcacagttcatgaggttatctatctaaagggctcaaaagacttcctttaaatatcgtaaccccctatgataaattcaaccttttgtggtgtggccaaaccattggggaaggggataatggctgtctgtaatagtaatatatagaagagaaatgattctgtccccataaacagtgaatttcaagaaacctgaagccctatatcattctcatgatttactaacatttgacgacaaggaaacatgccattttatttatttgttcacatattttccttattcatgagatttgcaaaacatgcactttgcaggtacttagttgttattgatgatatatggagtactcaagcatggaagattatcaaatgttctttgtttctgaatgacctgggaagcagaataatgacgacaacacgtagtattgatatagccaagtcatgttgctctcggcgccatgatcgtgtctatgaaataatgcctctgacgacagccaactctaagggtttattttttaaacgaatatttggctcagaagatatatgtcctcctcaattggaagaaatctcctcggaaatattaaaaaaatgtggtggttcaccattagcgattcttacaatagcaagtttattggccaataaagatagcacaaatgaagaatggaagtgggtgtataattcgatcggttcgacactgggaaaggaccccggtgtagaagagatgagaaggatactatctcttagctacgatgatcttcctcaccatttgaagacatgtttattgtatctgagtatatttccggaggactatgagattgagagggatcgattgataaggaggtggatcgctgaaggattcattgatacagatggtggacgagatttggaggaaataggagagtgttattttaatgatcttatcaatagaagtatgcttgagccagtgaaaatccaatatgacggtcaagtcgtttcatgccgagtgcatgatatgattctggatctccttgcatctaagtcaattgaagaaaactttgccaccttctctggtaaccaaaatgagatattagtccttcggcataagatccgtaggctatctctcaattattatgcccaagagcacaccatgcttccatcaacagcgatcatttctcattgccgttcgctcagtattgtcgggtatgctgaaaagatgccttctctttcgaagtttcgtgttctgcgagtacttgatattgagaatggtgaggagatggagagcaactgttttgagcatctaaggacgcttttccagttgaggtatttgcgactccacgttagaagtatttctgcactccctgagcagttaggagaactacagcatttgaggactctggatatgggctggacaaagatcacaaaaatgcccaaaagcattgttcagctgcaacatttgacatgtttgcgcgtcagtaatttggaattacctgaagggattgggaatctgcaagctctgcaggagctatcagatatcaaagtcaaccggcacagcacggcgtcttgtttgctggagctgggcagtctgaccaaactgaaaatccttgggctacgctggtcaattgtcagtacacacggtaacgaagacacttttgtggataacttggtatcctcgctgcgcaaactgggcagatccagccttcgatccatatgcattcgtagttatcatggctataccatggagttcttactggactcctggttcccctcccctcatctcatgcaaaagtttcagatgggcacatactacaacttccccagaattcctccttggatcgcgtcgctggacaagctcacatacctagatatcaatatcgatccagtagaagaggaagcactggagatccttggagaattgccttctttgctgtttctctggctgacgtcgaaatcggctgctccgaaacagcggctcgtcgtaagcagcagcatgtttgtgcgtctgaaggagctccacttcacctgctggagcaatgggcaaggactgatgtttgaggccggggccatgccaaggctcgagaagctgtgggttccgttcgacgcaggcagcggtcttgattctggcatccagcacctctcttccctcacgcatcttgccgtcgagatcatttgcgtcggcgcgactgctcgggacgtggaggcgttggaggaggccatcagaggtgcagcccgtctccttccgaaccgccctgcggtggaattccgaacatgggatgatgaaaagatggtggtggaggaggaggaggggcaaggcgtccctgaagaggagatccacgctagcggttga

SEQ ID NO: 398 - DNA, 3921 bp, Nicotiana benthamiana
  source 1..3921: mol_type = genomic DNA
atgttgacttcatcttcccatcatggacgcagttatgatgttttcctaagctttaggggagaagacactagaaaaacatttgtgggtcatctgtttaatgctcttattgaaaagggtattcacacattcatggatgataaggagttaaagagagggaagtcaatctcatctgaactcatgaaagccattggagaatcaagatttgctgttgttgtcttttccaagaactatgcttcctctacatggtgcttggaagaactggtaaagattcttgaaattcatgaaaaatttgagctaattgttgtcccagttttctatgatgtggatccatcaactgtgaggaaacaaaatggggagtatgctgtttgttttactaaatttgaagctaacttggttgatgatagagacaaagtgctaaggtggagggaagcacttactaaggtagctaacatatcagggcatgatttgcgcaacacttacaatggggatgaatcaaaatgcatacaacagatactgaaagacatattcgacaaattttgtttctctatctcaataactaacagagatttagttggaatagaatctcaaattaagaaactaagttcattgttgaggatggacctgaaaggagttcgtcttgttgggatttgggggatgggtggtgtgggaaagacaactgctgcaagagcattgtttaacagatactatcagaattttgaaagtgcttgttttctcgaagatgttaaagaatatctgcaacaccataccttgttgtatttgcagaagactctcctttccaaactgttgaaggtagaatttgtagattgtactgatactgaagaaatgtgtgtaatattaaagaggagactttgttctaagaaagttctggttgttcttgatgatgttaatcataatgaccagctggataagctggtcggagctgaagattggtttggtagtggtagtagaattgttatcacaactagggatatgaaactgttgaaaaaccatgatgtgcatgaaacgtacgagataaaggttttggaaaaagatgaagcaattgagcttttcaatttgcacgcattcaagagaagttcacctgaaaaggagtttaaggagctcttaaatcttgtggtagattatactggaggccttcctttagctcttaaggtgcttggttctctgctgtacaaggaagatcttgatgtatggataagtacgattgatagactaaaagataaccctgagggtgaaattatggctacacttaaaataagttttgatggattaagggattatgaaaaaagtatatttttagatattgcatgtttcttcaggggttacaatcaaagagatatgacagcattatttcacgcttctggtttccacccagttctaggagtaaagacccttgttgaaaaatctctcatttttattttagaggacaaaatccaaatgcatgatttgatgcaagagatgggtagacaaatcgcagttcaagaatcaccgatgagaagaatatatcgtccggaggatgtgaaggatgcatgcataggagatatgaggaaagaagcaattgaaggcttgttactcacagagcctgaacagtttgaagagggtgagttggaatatatgtacagtgctgaagctctcaaaaagacgaggaggctgaggatacttgtgaaagaatattacaacagagggtttgatgagcctgttgcctatcttcctaacagtctgctttggcttgaatggcgtaactactcttcaaactcatttccatcaaattttgaaccgtcaaagctcgtatatcttactatgaagggtagttctatcatcgaactctggaatggtgcaaagaggttagcatttttgacaactcttgatctcagttattgccacaaattgatacaaaccccagattttaggatgatcacaaatttggaaaggttgatcctgagctcttgtgatgcattggtggaagtccatccatctgttgggtttctcaagaatcttattttgttaaatatggatcattgcatatcacttgagagacttccagcaattattcaatcagaatgtcttgaagttcttgatctcaattattgctttaacttgaaaatgttcccggaagtggaaaggaatatgacgcacttgaagaaactcgacctcacttcaactgggataagagaactgccggcatcaattgagcatctcagttccctggaaaacctacagatgcattcctgcaaccaacttgtaagtctccctagtagtatttggagattcagaaatctgaagattagtgaatgtgagaaactggggagtttaccagaaattcacgggaatagcaattgtacccgtgaactcatcttaaaattagtttcgattaaggagcttcccacctctataggaaacctcacctcactaaatttccttgaaatctgtaattgcaaaactatttcgagtctctcgagcagcatatggggattgacaagtcttacaactctaaagttgttagactgcagaaaacttaaaaacttgcccggaattcccaatgccataaatcatttgtcaggacatggacttcagctccttctgacattggagcagcccacaatttatgaacgccttgacttgcttaggattattgatatgagctggtgtagttgtattagcagtctcccccacaacatttggatgttgaaatttttaaggattctgtgcatctcttactgctcgagactggagtatttaccagaaaatttgggtcacttggaacatttggaggaattacttgcagatggtactggtattttaagactaccatcttcggttgcacgtttaaataaacttgaggtcttatcattcaggaaaaagtttgcgattggaccaaaagtccaatattcatcatcaatgctcaatttacctgatgatgtttttggaagtcttggaagcttaggctcagtggtgaagttaaatcttagtggaaatggtttttgtaatttgcctgaaacgatgaatcaacttttttgccttgaataccttgatataacattttgccagaggctcgaagcattgccagagcttcccccaagcatcaaggagctatatgtagatgaacacttggccttgagaatcatggaagatttagtaattaaatgcaaggagttgaatttaatagccgtcacaaaaattgagtaccaaaatttctatcgatggttagactcaatatggtcagatgtgtcagaactgctggagaacagtcagaagcaacaactggatgatatgttgcagcttattcccttttcatatctgtcgacggctaagcgtgaggaagttcttaagattgttatccatggaacacgaattccagaatggttcagatggcaagatagaagtgccacaacgatgtcagtcaaccttcctgaatattggtacactgaaaatttcttgggattcgctatatgctgcagctgctgcttttatcattctgcacgtagttacgatgttgaatttgaggggagcatgcatcattacaattatgattccagttattggaaagagtatgaggaaccaagttatgacttttatgagagagatagcattgagattacagcaaaactaactccccgacataaaggaatgcggactgaagagctcaagaaagtctgttcattttccatgaatgtgttacgtcgtgctactgctgtccctaatatgtgctttgcattttttccatttaacagtctctgtcacatatcaaatttacaggcaaataacccaaatgactatgggatatttgaaacctgtttgagtccaggggacatccgccatcgtggaaaacaatgggggtttaatttggtgtataaagatgaaactggtggcagtgttacacacgaaatgctcataaacagatag

SEQ ID NO: 399 - DNA, 2538 bp, Nicotiana benthamiana
  source 1..2538: mol_type = genomic DNA
atggtggatgcggtggtcactgtattcttggagaaacttctgcatgttctcacagaggagagtaggtttcttactaaatacagacagcagtttgaaaaactgaagaacgagctgctattcatgcaaagctttctcaaagatgcagagaggctcaagaggaaaaacaacacccttaaaggggtcatgtcctgtttgcgagacttaatctttgaagctgaagagatacttgaggactgccagaatcaatctgcagatagcgatcgggctactacatgcttccatcctaaaaggctctctcttcgccatcaaactgggaagtgccttgctaaaatcaatgacagaatctcggagataaagcaaaacatttcaacatatcttggagtaccacttctcgaagaaggaagtatggaggcacacaataatctaatgtcaagatggacttcttccctttatgaccacactcaggtagttggtttggaaggtgacactgagaagataaaggattggctatttgaagcaagagatggtttacttaccattgcatttgtgggtatgggaggacttggtaaaaccactcttgctcagaaagtcttcaatgacaaaagggtggaggatcacttggagaggaggatttgggtgtctgtttctcaaacatttactgaggaacaagtcatgagaagcatattgaggagtttaggagatgcatgtgttggtgatgaccagtgtgaactgttaagaaaaataaaccagtaccttttgggaaagaggtttttgattgttatggatgatgtttggagctgggacaatgcctggtggcaaaaaatctatactggactgcccaaaggaaatgggagcactgttattgtaacaacgagaaatgagctagtcgctcgcaagatgggagttacagaagcaagaatacattggccaaaattcctcaatgagcactacagttggttactattccggaagattgcatttgcaggaagtgcaggtgaatgccatttccccgagttggaggacgtgggaaaggagattgtggaaaaatgcaagggtcttcctttagcaatcaaagcagtaggaggagtgatgctttgcaagccatcttactatcacgaatggaggcgtatttcaaatcatttccgtgatgaattgaaagaaaatgatgactcagtgatggcctcactacagttgagctatgatgaactccctccttacttgaaatcctgtttcctctgtttttcactatttcctgaggattgtgtcataccaaaagaccaactgatccgttggtggattggagaaggtttcatacctctgagaagtggtaggttatcgactgaagtgggagaagattgtttctcacaactatccaatcggtgtttgatagaagttgttgataaggcttacaatggtgtgatccacacatgcaaaatgcatgacatggttcgtgacttggtgatcaaattagccgaggatgatgcatttttcaccccagctgatgcaacttgtcggcatttgggtattaagagtgagatgaattggaagcaactattgagcaatcaaaaattacgagcactgctaacaaccaccaagagtggtgaagttaacaaaatccattccgacattgccaagaagctgtgcaagagtcgacacctccaagtattggatctgtcaaaatcaattttcgatgtgcctctttcaagtttgttggaaggaattggatctgctaagcagctcacttatctcagtttaagcaatacacatccaatgattggagttccagcttccatatccaagcttgaaaaattacagattttggatttcagctattgccaaaatatgaaaatgctcccctcttgcgttctgacatttgaggaacttgctgttttggatgtgaacaactgtggttcccttgagtaccttccaaaaggattaagtaggctttccaatcttcaagtattgcttgggtttaagcctgcaaaattaagccaaccaggaggttgtcgtattgctgagctcagaagcctgactcgactcagaactctcagtttaagactaaccgaaaatgaggagattggagacgatgaggggaacgcactggtagatctccaagaacttcaatttttaacaataagttgctttggcagtcaagataatggacttgcgacaaaacttggtagactttatcctccacgacaactccacgagctgattctcaaattttatccaagtaagacaagtcctgaatggcttaaccccaatctctcccccatgttgcgatatttatcaatcatctctggtgatattacacaaatgcacgagaacttctggggtgatggtagtactgcttggaaaattgagggcttaatgttggaatctttatcggatttgagattggaatggtcagcaatgcatcaagtcatgccttcgttaagaatactcaaggttagctggtgccctgagttggagtcatttccaattgaagatgcagggtttagagggggtctatggaagaaggaagaacataggaactga

SEQ ID NO: 400 - DNA, 8394 bp, Oryza sativa
  source 1..8394: mol_type = genomic DNA
tcctcgagggtatagaccatatttcccctggtttccattgatgtggcatatatcagggcccactacctcaaccatcaccacgtccagtcctttcggcctgttcgcgatgacgagctcggccaccacctcaacatcgtccatgctgcggcgatggcgaggagacagctgggacggtgaacctcatagctccgtctgttgcaacatcctctcgccatgctcacgtcgccacgacacccttgtcctcctgctccgtagcagcctcgcaagctcacgccgcggcctcgtcgaggtcctctgtccccgagccgcttctagcatcgatgagctgaggaactccccactgccgaggcgatgacgatttggcagggagggctcgattcgcccactccaattcgcagcttcacacctcccctccccctcctattcatccaccaccaacgcggataggagaagggatagaggaaggtgtgcgtggacacttacatgttggtcccatatattttttttactcggatgccacgtcagataaaacaaccgtcggtcaacatttttcgtattgcggattaggaacgtcattcatgactcgacgcagagctgagggatggcaagtgaacttattcccataaaacttccaaaagtttggaatgctcaacttgggcttctcttcggatgctgaagtgctaatgggccaaataaccaactagcccacagcccatcgaagtggaagccgacgagtccaccgtcaacgcggcagtagtaatccgagaaaacgcgggtcgcgcgaagcaatcgatcatcatcagacgattaatccacgacgaccaggagcgctgccccgagccacacgcccacacgcactggtgaatcttctcctttccacctagttttcactctgcagtctcctctcctagctactactctgccttcccatcctcgcttgttgcagccctcttgcacacgccattggccacagtccaaggactgctcctgttccgatggaggaggtggaagccggtttgctggagggcgggatcaggtggctggcggagaccatcctggataacctggacgccgacaagctggatgagtggattcgccagattaggctcgccgctgacaccgagaagctacgggctgagatcgagaaggtggatggggtggtcgctgccgtgaaggggagggcgatcgggaacaggtcgctggcccgatctctcggccgtctcagggggttgctgtacgacgccgacgatgcggtcgacgagctcgactacttcaggctccagcagcaggtcgagggaggaggtactgtctttgcatatatccgtgccttttaattaagtttgcaagctgcgttgcctgcaacaatggcgtattggcgtcagtttccaatccatgcttgtgctacagttactacacggtttgaggctgaagagacggtcggagatggagcagaggacgaggacgatattccgatggacaatactgatgtaccggaggcagtggcggcaggcagcagcaagaaacggtccaaggcatgggaacactttactaccgtagagttcactgctgacgggaaggattctaaagcacggtgcaagtactgccacaaggacctatgttgcacatctaagaacgggacatcagctttgcgcaaccatctcaatgtttgcaagaggaaacgtgtaacaagtactgaccaaccggtaaatccatcaaggtaatgctaatggagttctgaatttagtgtaaatccgttgaagtgtaaatttggcccgttacatctgcttaagatctcattctgtctctaatcttctaatagccaactcatggtcattttttttcctaatatatagtaccggtgatggtgcaccaaatgtaattagatgcaaggaaacaaaagtgaacaattgtatatatcaaatataattatatctaaaacatgagtagtgtatcaaatccaattctttcaaaaatctactatgcaaaattgagtgacaaaatctgctgccttttttttttacagaaagcaaccaattaatataagtcaaatataaaaacgctttgtagtctccaataaaatagctcattgtttcgtttatacttatgtttataaatttaaatttaaaacttaattttggagttgattttgtggttttcttttcatcctattttattttacaacatttgattttgaatagttaagaatgcgtatataaaaattttacccataagttattttttaaattgttaataaatcgtaaggataatcataagtataagtgaaacgattcgctcttcatctacttaagattgcgttatattgctgacctttctaatcgcctaaccacgatcacatgctcttccagtgccggtgagggtgcatcaaatgcaactggtaattcagttggcagaaaaaggatgagaatggatgggacttcaacacaccacgaggcagttagcacgcacccttggaacaaggctgaactttccaacaggatccaatgcatgactcatcagttagaagaggctgtaaatgaggttatgaggctatgtcgatcctcaagttcaaaccagagtcgacagggtacaccaccggccacaaatgcaacaacatcgtcttatcttccggagcccatagtgtatgggagggctgcagagatggaaaccatcaaacagctgatcatgagcaatagatctaatggcataaccgtcctgccaattgtaggcaatggagggataggaaaaaccactttggcgcaactggtctgcaaagatctggtaattaaaagtcagtttaatgttaagatatgggtgtatgtatctgataaatttgatgtagttaagattacaaggcagattttggatcatgtctccaaccagagccacgaaggaataagcaaccttgatacgcttcagcaggatcttgaggaacaaatgaaatctaagaagttcctcattgtcttagatgatgtgtgggaaatccgtacagatgactggaaaaaactactggctcctttaagacctaaagatcaggtgaattcgtcacaggaagaggcaacaggtaatatgataattttgacaactcgtatacagagtattgccaaaagtcttggaacagtacaatcaattaagttagaagctctgaaagatgacgatatatggtcactatttaaagtgcatgcttttggtaatgataaacatgatagtagtccaggcttacaggttcttgggaagcaaattgctagcgagctaaaaggcaacccactggcagcaaaaactgtgggttcactattaggaacgaatcttaccatcgatcattgggatagcattataaagagtgaagaatggaaatccctgcaacaagcttatggcatcatgcaagcgctgaagttgagctatgatcatctatccaaccccttacagcaatgcgtctcttattgttctcttttccccaagggttattctttcagcaaagcacaactaatacaaatatggattgctcaaggatttgtggaagaatccagtgagaagttggagcagaaaggatggaaatatctagctgagttggtaaattcgggtttccttcagcaagttgaaagcacacggttttcatcagaatattttgttatgcacgatcttatgcatgatttagcgcaaaaggtttcacaaacagaatatgcaactatagatggctcagagtgcacagagttagccccaagtatacgccatttgtcaatagtaactgattctgcataccgcaaggagaaatatagaaacatatctcgtaatgaggtgtttgagaaaaggttgatgaaagttaagtcaaggagtaagttgaggtcactggtattaattgggcaatatgattctcatttttttaaatatttcaaagatgctttcaaggaagcacaacatctgcgactgctgcagatcactgcaacttatgctgattctgattcatttctctccagtttggtaaattctacacatctccggtatctgaaaattgtgaccgaagaatccggcagaactttgccccgatctctaaggaagtattaccatcttcaagtactagatattggctatagatttggaattccccgtatatctaatgatataaataatcttctcagcctgcggcatcttgttgcatatgatgaagtgtgttcttccattgctaacattggtaaaatgacctcacttcaggaactaggcaattttattgttcagaataatttaagtggttttgaggtgacacaattgaaatccatgaacaagcttgtacaacttagtgtgtctcagcttgaaaatgttagaactcaggaggaggcatgtggggcaaaactgaaagacaaacaacacttagaaaagctacatttgtcctggaaggatgcatggaatggatatgacagtgacgaaagctatgaagatgaatacggcagtgatatgaatatagaaacagaaggggaggaactgtcagttggtgatgccaatggtgcccaaagcttacaacatcacagtaatataagctctgaacttgcttcaagtgaggtgctcgaaggtcttgaaccacatcacggcctcaagtatctacggatatctgggtataatggatctacctccccaacttggcttccttcttcacttacctgtctgcaaacacttcatctagaaaaatgtggaaaatggcaaatacttcctttagaaaggctagggttacttgtaaagctcgtgttgatcaaaatgaggaatgcaacagaactctcaatcccttcactggaggagcttgtgttaattgcattgccaagcttgaacacatgctcctgcacttccatcaggaacttgaactccagtttaaaggttctgaaaattaagaattgccctgtactgaaggtatttcccttgtttgagatttcccagaaatttgaaatcgagcggacgtcgtcatggttgccccatcttagcaagcttaccatctataattatcctctttcctgtgtgcacagttctctgccaccttccgcaatcagtggttatggagaatatggaaggtgtacccttccgcaatcacttgaggaactttacatccatgagtattctcaagaaactctgcagccctgcttttcagggaacctcactctcctgagaaaattacatgtactgggaaactcaaatttagtgtctctgcagctccattcctgcacagcactcgaagagttgataattcaaagctgtgagtctcttagttctctggatggcttgcaattgcttggcaatctcaggttgctgcaggcacatagatgcctcagtggtcatggagaagatggaaggtgtatccttccgcaatcacttgaggaactttacatccatgagtattctcaagaaactctgcagccctgcttttcagggaacctcactctcctgagaaaattacatgtactgggaaactcaaatttagtgtctctgcagctccattcctgcacagcactcgaagagttgataattcaaagctgtgagtctcttagttctctggatggcttgcaattgcttggcaatctcaggttgctgcaggcacatagatgcctcagtggtcatggagaagatggaaggtgtatccttccgcaatcacttgaggaactttacatccatgagtattctcaagaaactctgcagccctgcttttcagggaacctcactctcctgagaaaattacatgtactgggaaactcaaatttagtgtctctgcagctccattcctgcacagcactcgaagtgttgataattcaaagctgtgagtctcttagttctctggatggcttgcaattgcttggcaacctcaggttgctgcaggcacatagatgcctcagtggtcatggagaagatggaaggtgtatccttccgcaatcacttgaggaactttacatccatgagtattctcaagaaactctgcagccctgcttttcagggaacctcactctcctgagaaaattacatgtactgggaaactcaaatttagtgtctctgcagctccattcctgcacagcactcgaagtgttgataattcaaagctgtgagtctcttagttctctggatggcttgcaattgcttggcaatctcaggttgctgcaggcacatagatgcctcagtggtcatggagaagatggaaggtgtatccttccgcaatcacttgaggaacttttcatcagtgagtattctctagaaactctgcagccctgcttcctgacgaatctcacctgcttaaaacaattaagggtatcaggcaccacaagtttcaaatctctagaactgcaatcatgcactgcactcgaacatttgaagattcaaggttgtgcgtcgcttgctacattggaggggttgcaattcctccacgccctcaggcatatggaagtattcagatgccctggcttgcctccatatttggggagttcgtcagagcagggctatgagctatgcccacgactggaaaggctcgacatcgatgacccctctatccttaccacgtcgttctgcaagcacctcacctccctccaacgcctagagcttaactattgcggaagtgaagtggcaagactaacggatgagcaagagagagcgcttcagctcctcacgtccctgcaagagctccggtttaagtattgctacaatctcatagatcttcctgcggggctccacagccttccctccctcgagaggttggagatccggagttgcaggagcatcgcgaggctgccggagaagggcctcccaccttcgttcgaagaactggatatcatcgcttgcagtaatgagctagctcagcagtgcagaactctagcaagcactctgaaggtcaaaattaatgggggatatgtgaactgattactcggtggcttgttaggcgcacctttttccacctgcccaactggcgtgggctcgttcaggcgttcaagctgctgtaaattccattgccgcaatgacgaccttcagaaccgttacacaatacaaaggacatatgatggctagatcaactgtcgcagagctagctttggttcacctgaaaacataaggccaaacgcgtggttcttttaatcagaagtatcaaaaattggttttggtttttaacgaaaagatgttagaaattggttttaatgtgccagattctgtaccagaattctgtattttgctccgtaattctgtgctacgactgatgttgtatttaactgatagcaatcgaccggcaaaaccaatccgctccaatgcattgtcacatacaaattctataattctatctactgaaaaggatgattgctgttcattttcgtgattacagaaggaactgtgtatatcgtgctatttttgcattcacattgtgtcccaggttgtgctcggatcagccaatttcggtggttaattcactttgttgtgtcctctgtgcactcaagaattgttcgcacatgcaattcagttgagcatcgcactacgcaagttttttttgttaacaaaggagtggttgacagcattgcaggttgctaaaaccgtgtcaaaaatttgctaacaaaagaattctcttcagaaatagtatgaaaataaatgccacataagtaatctgagtaaaacagacagaatcactagagaagactaacgacaaaatcttctttttcaatttctgtggtgaaaaactcactaactccgcatataatctcatgtatgcattggaggtgcataccatttcgatcatgtatgcatttagctgaacattatcaagaagcaaatttattgcacgggcaaacataagctaaactaattctcaagcaatttaataatcacaaaacagtctgcaataccaagatatataaaacttttgccagcatggagcaacaacaccgaaacactacaatcaagacagctcccagaaaagattatatgttgctacttcaattgccacagttacaatcacccataatgacacatcaaattacataagagtattaagagtatatgacagttgtaacaaaacaactgcattgagaactagaacagacagccacatgaaccatattcacttcttcagatcagaaagcctggtgaactaccagtctaccaattgctaccgtagtctccatttttcacttatatgtacataggacacctgcgctatcagaatagccacaaagccagttcactcgctacaaattaatcttgactaaatccaaacagataccaactcctcttaatcaacttacaaaacacctacacttttggtgtctctacaccaccaatcacacaaaaggaaattaatcatccaccaactcgtatcctactgttagaatggaggccttacaccagagaatgggcattgccagattctgagacactgtcctttgagctccctga

SEQ ID NO: 401 - DNA, 3441 bp, Solanum lycopersicum
  source 1..3441: mol_type = genomic DNA
atggcatcttcttcttcttcttctgcaagtaattcaaagtattatcctcgatggaagtacgttgtttttctaagtttcagaggtgaagacactcgaaaaacatttacaggtcacttatacgaaggtttgagaaatagaggaataaacacatttcaagatgataaaagactagagcatggagattcaattccaaaagaactcttgagagctatagaagattctcaagttgcacttatcattttctcaaagaattatgctacatctaggtggtgcttgaatgaactagtgaagatcatggaatgcaaagaggaagaaaatggacaaacagtcataccgatcttttataatgtggatccatcacatgttcgataccaaactgaaagctttggagcagcatttgccaaacacgaatcaaagtataaggatgatgttgaggggatgcagaaggtgcaaagatggagaactgccctaactgctgccgcaaatctaaaaggatatgatatccgtaacgggattgaatcagagaatattcagcagatcgtagattgcatctcttccaaattttgtacgaatgcttattctttatcttttttgcaagatattgtgggaataaatgctcacttagagaaactaaaatcgaaacttcaaatagaaatcaatgatgttcggattttagggatctggggaataggcggagtcggtaaaacaagaatagcaaaagccatttttgatactctatcttatcaatttgaagcttcttgttttcttgctgatgttaaagaatttgcaaaaaagaataaactgcattctttacaaaatattcttctctctgaactgttaaggaaaaaaaatgattacgtctacaacaagtatgatggaaagtgtatgattccaaacagactttgttctttgaaggttctaattgtgcttgatgatatagatcatggtgatcagatggagtatttagcaggtgatatttgttggtttggtaatggcagcagagttattgtaacaactagaaacaaacatttgatagagaaagatgatgcgatatacgaagtgtctacactgcctgatcatgaagctatgcaattattcaatatgcatgcttttaaaaaagaagttccaaatgaggattttaaggagttggcgttagagatagtaaatcacgctaaaggcctccctttagccctcaaggtgtggggctgtttattgcataaaaaaaatctctctttatggaaaataacagtagagcaaataaagaaagactctaattcagaaattgttgaacaactcaaaataagttatgatgggttggagtccgaagagcaggaaatatttttagatatagcatgtttcttccgcggagagaaaagaaaagaggtcatgcaaattcttaagagttgtgactttggagctgaatacggattggatgttctgattaataaatctcttgtgttcatatctgaaaatgacaggattgaaatgcatgatttgattagagatatgggtagatatgtggtgaaaatgcaaaagcttcagaaaaaacgtagcagaatatgggatgttgaagatttcaaagaagtgatgatagactatacggggaccatgacagtggaagcaatctggtttagttgctttgaagaagtacgttttaataaggaggcaatgaaaaaaatgaaaaggcttaggatattacacatatttgatggttttgtcaaattcttctcttcgcctccctcttccaattccaatgattcagaagaagaagatgattcctacgacttagtcgtagatcaccatgatgactctattgagtacctgtccaataacttgcgttggttagtctggaatcactattcttggaagtcattgccagaaaattttaaaccagaaaagcttgttcatcttgaactccgttggagttcgcttcattatttatggaagaaaacagagcatttgccgtctctacgaaagctagatctcagcttatctaaaagtctggtgcaaacaccagatttcacggggatgccaaatttggagtatttgaatctggagtactgtagtaagcttgaagaggttcactattccctagcatattgcgaaaaactcattgagttaaatttgagttggtgtacaaagcttaggagatttccatatattaacatggaatctcttgaatctctggatctacaatattgctatggtataatggtgtttccagaaatcatcggaacgatgaagccggagttaatgattctctcagcaaacactatgataactgaactaccatcatctcttcagtacccaactcatctcacagagctagatttgagtggcatggaaaaccttgaagctcttccaagcagcattgtcaagttgaaagatttggtgaagctaaatgtgtcgtactgcttaacgcttaaaagcttgcctgaagagattggtgatttagaaaacttggaggaacttgatgcttcgcgtactctaatttcacagcctccatcttccattgtccgcttgaacaagcttaaatccttgaagttaatgaaacgaaacacattaacagatgatgtgtgctttgtgtttcctcctgtgaataacgggttactctcattggaaattctggagctcggttcctccaatttcgaagatggaagaattccggaagatattggatgtttatcctctttgaaagagttacgtctcgagggagataatttcaatcatttgcctcaaagcatagcccaacttggtgcacttcgattcttatacataaaagattgcaggagtcttacaagtctgccagaatttccaccgcaattagatacaatatttgcagattggagcaatgatttgatctgtaagtcactgtttctaaatatctcatcattccaacataacatctctgcttcagattcgttgtcgttaagagtgtttacgagtttggggagtagtatcccaatctggttccaccatcagggaacagatacaagtgtttcagtcaatttgcctgaaaactggtatgtatcagataacttcttgggattcgctgtatgttactatggcaatttaactgagaacacagctgaattgattatgagttctgcagggatgccatgtatcacctggaaacttttgttatcgaatcattcagaatgtacatatattaggattcattttttcttggtaccttttgctggcttatgggatacatctaacgccaatggtaaaacaccaaatgactataagcacattatgttatcttttcctcaagaattgaaggagtgtggagttcgtttgttctatgaagatgaatctgtgcttgagaccaccaatgatgaacttaccattggggtaaggaggatcagatacgacgacgacgatagtgaacattatgaggaggctggttgttcctcttctaagaaacaaagatcataa

SEQ ID NO: 402 - DNA, 2718 bp, Zea mays
  source 1..2718: mol_type = genomic DNA
atggcagagattgctgttcttctcgtcctgaagaagattgccatagctctggcaggagagaccctaagttttgctaaaccattgcttgcaaagaagtctgagtcggtggcagcactcccagatgacatgaaactgattagtaatgagctcgagcttatccgggcgtttctcaaggaaatcggcaggaaaggctggaaaagcgaagtgatagaaacatggatagggcaggtccgaagactggcttatgatatggaagacactgtagaccattttatttacgttgttggtacacacgatcagatgggatcatgctgggattacatgaagaagatagccaagaagcctcggcgtctggtttcactagatgaaattgctagtgagattaagaagataaagcaagagcttaaacaactctcggaaagtagagaccgctggactaaacccttggatggcgggagtggtatacctgcaggaagctatgaaactgaaaaggaaatgtatcttcctggacatgattacacaatcagcgacgaggagcttgcaggaattgatgaaaataagcaaaccttgattagttcattaaaatttgaagatccatcacttcggatcattgctgtctggggtatgggtggcgttggaaaaagcactcttgtaaataatgtgtacaaaaatgaaggatccaactttgactgccgtgcatgggtttctatctctcagtcatatagactagaagatatatggaagaaaatgctgacagatctcatcgggaaagataagatagaatttgatcttggaacaatggatagtgcagaactaagagagcaattgacaaaaactctagacaaaaggcagtacctgatcatactggatgatgtctggatggctaatgttttttttaaaattaaagaagttcttgtagataatggccttggaagcagagtaataatcacaacaagaattgaggaggtagcttcactagctaagggtagttgtaagatcaaagtagaacctctgggtgtcgatgattcctggcatgtattttgtaggaaggcatttctgaaagatgaaaaccatatctgccctccagagttgcgtcagtgtggtataaacattgtggagaaatgtgatggtttgccattagcccttgtggcaataggaagcatattgtcgctgagaccgaagaatgttgacgagtggaagctattttatgaccagcttatctgggagctacacaacaatgagaaccttaatcgcgtggagaaaattatgaatctaagttataaatacttaccagactatttgaagaactgcttcctgtattgtgctatgtttccagaagactatctaatacacagaaagagattgattagattgtggatagctgaaggatttattgaacaaaaaggggcatgcagcttagaagacactgctgaaagttatcttaaagaacttatacgacggagcatgcttcacgttgcagagaggaactgctttggtaggattaaatgtattcgaatgcatgatcttgtgcgtgaacttgccattttccaatctaaaagagagggtttcagtacaacttatggtggaaataatgaagcagtgctagtgggatcatattctcgacgagtggctgtgctccaatgcagcaagggcattccatcaaccattgatccatccaggcttcgcaccttaattacattcgacaccagcagagcattatctgtgtggtattcttctatttcctccaaaccaaagtaccttgcagtattagacttatcaagcttgcctattgagactattccaaattcaattggagagcttttcaaccttaggcttttatgcctcaataaaaccaaagtgaaagagctccctaaatctattacaaaacttcaaaacctacagacaatgagtcttgagaatggggagttagtgaagttcccacaagggttttcaaaactgaagaaattgcgacatcttatggtttcacggttgcaagatgtaactttcagcggtttcaaaagttgggaagctgtggagccatttaagggcttgtggactttgattgaactgcaaactctgtatgccattacagcaagtgaagtattagttgcaaaacttggaaatttatcccagctgaggcggcttataatttgtgatgtaaggagtaacttatgtgcacagttgtgtggctctttgtcaaagttgtgccagctgtcacgattaacgataagagcatgcaatgaagatgaagtgctacagctggatcatttgacatttccaaatcctcttcaaacccttagtttagatggacgactgtcagaaggaactttcaaatctccctttttcttaaatcatggaaatgggcttcttaggctaatgttgttttacagtcagctttcagaaaatccagtaccacacctctctgaattgtcaaacttgactaggttatcccttataaaggcatacaccggccaagaattatacttccaagcaggttggttcctgaatttaaaagaactttacttgaagaatttgtcccggctcaatcaaatagacatacaggagggagctttggccagccttgaacgtataacaatgaaacacctcccggagctacgggaggttccagtcggtttcagatttctcaagtccctaaaaacaatatttttttccgatatgcatcctgagtttgaaagcagctttcaaaaggaaatgtag

SEQ ID NO: 403 - DNA, 1005 bp, Oryza sativa
  source 1..1005: mol_type = genomic DNA
acattggtagtagtgcaatgtcagagcttcaatcactgccagacctcaatagactatcactagtgaaccttgaaaaggtttcagacactgaagatgcaagaatggcaaaacttcaagagaaagaaaagctcgagacattgatgttgaggtggaatatggatgctggaaatgccagtagaatagatcatgaagtacttgaaaccctccaacctagccagtgcctgaaaactttggagattgttgcgtatgaaggatatgtatttccatcttggatgacaagaaccgagccatatcttacatctctggttgagataagactagttaatatgagagcatgtgaaaaggcattacctccacttgggatactaccatgtctgaagattgcagagataagtggagttgataatctcagttctattggtgataatttctatggtcataacggcacattcccttcactggagaagctgattctatcatacatgacaagccttgaagtctgggaacagtcatctaggatgaatctgtttcctcgtcttgcagaacttgtcatcattcagtgcccaaaattgagagcactgcatatggagtttccatcgattgaaaagttgattttgtggatgaataacaagatgttgtacagctcgaaggaaggtatgagaggtgtagagaagagcctcgaaaatctttcaatttctttctgtgaagagttgcatgcttcttcaggctgtgagggtctacaggctcttgatcgcctcaagaagttggagatatgtggttgtcatgaattatcatgcctcccacagggtttgcagcatctttcctctctcaccagcttgaaaattgataactgcaacaaattggagattttgccagaatggttggagaacctaccttttctacagataatgtgtttgtctggctgtccaattctgcactccattcctgaaggcctaacatgtagcgacattattgttgaagattgccccaattttaaagaaccat

SEQ ID NO: 404 - DNA, 3102 bp, Oryza sativa
  source 1..3102: mol_type = genomic DNA
atggcggagacggtgctgagcatggcgaggtcgctggtgggcagtgccatcagcaaggccgcctctgccgctgccaatgagacgagcctcctgctgggcgtcgagaaagacatctggtatatcaaagatgagctaaaaacgatgcaagcattccttagagctgctgaacttatgaaaaagaaagatgaactattaaaggtttgggcagagcaaatacgtgacctgtcatatgacattgaagattcccttgatgaatttaaggtccatattgaaagccaaaccctatttcgtcagttggtgaaactcagagaacgccaccgaattgctatccgtatccacaaccttaaatcaagagttgaagaagtgagtagcaggaacacacgctacagtttagtcaagcctatttcctctggcacagagattgacatggattcctatgcagaagacattcgtaatcagtcagctcgcaatgtggatgaagctgagcttgttgggttttctgactccaagaaaaggctgcttgaaatgatcgataccaatgctaatgatggtccggccaaggtaatctgtgttgttgggatgggtggtttaggcaagacagctctttcgaggaagatctttgaaagcgaagaagacattaggaagaacttcccttgcaatgcttggattacagtgtcacaatcatttcacaggattgagctacttaaagatatgatacgccaacttcttggccccagttctctggatcaactcttgcaagaattgcaagggaaggtggtggtgcaagtacatcatctttctgagtacctgatagaagagctcaaggagaagaggtactttgttgttctagatgatctatggattttacatgattggaattggataaatgaaattgcatttcctaagaacaataagaagggcagtcgaatagtaataaccactcggaatgttgatcttgcggagaagtgtgccacagcctcactggtgtaccaccttgatttcttgcagatgaacgatgccataacattgctactgagaaaaacaaataaaaatcatgaagacatggaatcaaataaaaatatgcaaaagatggttgaacgaattgtaaataaatgtggtcgtctaccattagcaatacttacaataggagctgtgcttgcaactaaacaggtgtcagaatgggagaaattctatgaacaccttccttcagaactagaaataaacccaagcctggaagctttgaggagaatggtgaccctaggttacaaccacctaccatcccatttgaaaccatgctttttgtatctaagtatctttcctgaggattttgaaatcaaaaggaatcgtctagtaggtagatggatagcagaagggtttgttagaccaaaggttgggatgacgactaaggatgtcggagaaagttactttaatgagctaatcaaccgaagtatgattcaacgatcaagagtgggcatagcaggaaaaattaagacttgtcgaattcatgatatcatccgtgatatcacagtttcaatctcgagacaggaaaattttgtattattaccaatgggagatggctctgatttagttcaggaaaacactcgccacatagcattccatgggagtatgtcctgcaaaactggattggattggagcattattcgatcattagctatttttggtgacagacccaagagtctagcacatgcagtttgtccagatcaattgaggatgttacgggtcttggatcttgaagatgtgacattcttaatcactcaaaaagatttcgaccgtattgcattgttgtgccacttgaaatacttgagtattggatattcgtcatccatatattcacttcccagatccattggtaaactacagggcctacaaactttgaacatgccgagcacatacattgcagcactaccaagtgagatcagtaaactccaatgtctgcatactcttcgttgtataggacagtttcattatgacaactttagtctaaaccacccaatgaagtgcataactaacacaatatgcctgcctaaagtattcacacctttagttagtcgcgatgatcgtgcaaaacaaattgctgaattgcacatggccaccaaaagttgctggtctgaatcaatcggtgtgaaggtacccaaaggaatagataagttgcgagacttgcaggttctagagtatgtagatatcaggcggaccagtagtagagcaatcaaagagctggggcagttaagcaagctgaggaaattaggtgtgacaacaaacgggtcgacaaaggaaaaatgtaagatactttatgcagccattgagaagctctcttccctccaatctctccatgtggatgctgtgttattctcaggtattattggaacacttgagtgcctagattctatttcatctcctcctcccctactgaggacactcgtgttggatggaattcttgaggagatgcctaactggattgagcagctcatgcacctgaagaagatctacttattgagcagcaaactaaaggaaggtaaaaccatgctgatacttggggcactgcccaacctcatggtccttcatctttatcggaatgcttaccttggggagaagctagtattcaaaacaggagcattcccaaatcttagaacactttggatttatgaattggatcagctaagagagatcagatttgaggacggcagctcacccctgttggaaaagatagaaataggcgagtgcaggttggaatctgggattactggtatcattcaccttccaaagctcaaggagattccgattagatacggaagtaaagtggctgggcttggtcagctggagggagaagtgaacgcacacccaaatcgccccgtgctgctaatgtacagtgaccgaaggtatcacgacctgggggctgaagccgaaggatcttctatagaagtgcaaacagcagatcctgttcctgatgccgaaggatcagtcactgtagcagtggaatcaacggatccccttcccgagcaggaggagagagctcgcagtcgcaggtgatcacgttgacgacgaatgatagcgaagaagataggcacagctcaagctggctga

SEQ ID NO: 405 - DNA, 4288 bp, Oryza sativa
  source 1..4288: mol_type = genomic DNA
caccgagtgtgagcggcaacggcggtcagggagcaggcgtggctcgtcggcgagcggctacgggcaacggcgccttggcgtcaggcatccgccgtcactcacctcaagcttgcgggctctgcgaccaccctctcatagtcataggccacagaagcacatttgccttgtgcgtgctgttcgtctgttccactcgtgaacatcagacgcgaagattatagattcacccctgttcacagattcaggtctgtcacgaggcgtatgatcatcaactctgccacaaaatccattcaaaaatagaacagagcaatggaggcgacggcgctgagtgtgggcaaatccgtgctgaatggagcgcttggctacgcaaaatctgcatttgctgaggaggtggccttgcagcttggtatccagaaagaccacacatttgttgcagatgagcttgagatgatgaggtctttcatgatggaggcgcacgaggagcaagataacagcaaggtggtcaagacttgggtgaagcaagtccgtgacactgcctatgatgttgaggacagcctccaggatttcgctgttcatcttaagaggccatcctggtggcgatttcctcgtacgctgctcgagcggcaccgtgtggccaagcagatgaaggagcttaggaacaaggtcgaggatgtcagccagaggaatgtgcggtaccacctcatcaagggctctgccaaggccaccatcaattccactgagcaatctagcgttattgctacagccatattcggcattgacgatgcaaggcgtgccgcaaagcaggacaatcagagagtggatcttgtccaactaatcaacagtgaggatcaggacctaaaagtgatcgcggtctggggaacaagtggtgatatgggccaaacaacaataatcaggatggcttatgagaacccagatgtccaaatcagattcccatgccgtgcatgggtaagggtgatgcatcctttcagtccaagagactttgtccagagcttggtgaatcagcttcatgcaacccaaggggttgaagctctgttggagaaagagaagacagaacaagatttagctaagaaattcaatggatgtgtgaatgataggaagtgtctaattgtgcttaatgacctatccaccattgaagagtgggaccagattaagaaatgcttccaaaaatgcaggaaaggaagccgaatcatagtgtcaagcactcaagttgaagttgcaagcttatgtgctgggcaagaaagccaagcctcagagctaaagcaattgtctgctgatcagaccctttacgcattctacgacaagggttcccaaattatagaggattcagtgaagccagtgtctatctcggatgtggccatcacaagtacaaacaatcatacagtggcccatggtgagattatagatgatcaatcaatggatgctgatgagaagaaggtggctagaaagagtcttactcgcattaggacaagtgttggtgcttcggaggaatcacaacttattgggcgagagaaagaaatatctgaaataacacacttaattttaaacaatgatagccagcaggttcaggtgatctctgtgtggggaatgggtggccttggaaaaaccaccctagtaagcggtgtttatcaaagcccaaggctgagtgataagtttgacaagtatgtttttgtcacaatcatgcgtcctttcattcttgtagagctccttaggagtttggctgagcaactacataaaggatcttctaagaaggaagaactgttagaaaatagagtcagcagtaagaaatcactagcatcgatggaggataccgagttgactgggcagttgaaaaggcttttagaaaagaaaagttgcttgattgttctagatgatttctcagatacctcagaatgggaccagataaaaccaacgttattccccctgttggaaaagacaagccgaataattgtgactacaagaaaagagaatattgccaaccattgctcagggaaaaatggaaatgtgcacaaccttaaagttcttaaacataatgatgcattgtgcctcttgagtgagaaggtatttgaggaggctacatatttggatgatcagaacaatccagagttggttaaagaagcaaaacaaatcctaaagaagtgcgatggactgccccttgcaatagttgtcataggtggattcttggcaaaccgaccaaagaccccagaagagtggagaaaattgaacgagaatatcaatgctgagttggaaatgaatccagagcttggaatgataagaaccgtccttgaaaaaagctatgatggtttaccataccatctcaagtcatgttttttatatctgtccattttccctgaagaccagatcattagtcgaaggcgtttggtgcatcgttgggcagcagaaggttactcaactgcagcacatgggaaatctgccattgaaatagctaacggctacttcatggaactcaagaatagaagcatgattttaccattccagcaatcaggtagcagcaggaaatcaattgactcttgcaaagtccatgatctcatgcgtgacatcgccatctcaaagtcaacggaggaaaaccttgtttttagggtggaggaaggctgcagcgcgtacatacatggtgcaattcgtcatcttgctataagtagcaactggaagggagataagagtgaattcgagggcatagtggacctgtcccgaatacgatcgttatctctgtttggggattggaagccattttttgtttatggcaagatgaggtttatacgagtgcttgactttgaagggactagaggtctagaatatcatcaccttgatcagatttggaagcttaatcacctaaaattcctttctctacgaggatgctatcgtattgatctactgccagatttactgggcaacctgaggcaactccagatgctagacatcagaggtacatatgtaaaggctttgccaaaaaccatcatcaagcttcagaagctacagtacattcatgctgggcgcaaaacagactatgtatgggaggaaaagcatagtttaatgcagaggtgtcgtaaggtgggatgtatatgtgcaacatgttgcctccctcttctttgcgaaatgtatggccctctccataaggccctagcccggcgtgatgcgtggactttcgcttgctgcgtgaaattcccatctatcatgacgggagtacatgaagaggaaggcgctatggtgccaagtgggattagaaaactgaaagacttgcacacactaaggaacataaatgtcggaaggggaaatgccatcctacgagatatcggaatgctcacaggattacacaagttaggagtggctggcatcaacaagaagaatggacgagcgtttcgcttggccatttccaacctcaacaagctggaatcactgtctgtgagttcagcagggatgccgggcttgtgtggttgcttggatgatatatcctcgcctccggaaaacctacagagcctcaagctgtacggcagtttgaaaacgttgccggaatggatcaaggagctccagcatctcgtgaagttaaaactagtgagtactaggctattggagcacgacgttgctatggaattccttggggaactaccgaaggtggaaattctagttatttcaccgtttaagagtgaagaaattcatttcaagcctccgcagactgggactgcttttgtaagcctcagggtgctcaagcttgcaggattatggggcatcaaatcagtgaagtttgaggaaggaacaatgcccaaacttgagaggctgcaggtccaagggcgaatagaaaatgaaattggcttttctgggttagagtttctccaaaacatcaacgaagtccagctcagtgtttggtttcccacggatcatgataggataagagccgcgcgcgccgcgggcgctgattatgagactgcctgggaggaagaggtacaggaagcaaggcgcaagggaggtgaactgaagaggaaaatccgagaacagcttgctcggaatccaaaccaacccatcattacctgagctcctttggagttactttgccgtgctccatactatcctacaagtgagatcctctgcagtactgcatgctcactgacatgtggacccgaggggctgtggggcccacatgtcagtgagcagtactgtgcagtactgcagaggacctgcatccactatcctatattataatggattgtactatcgatccaactattcagattaactctatactagtgaacttattttt

SEQ ID NO: 406 - DNA, 11516 bp, Oryza sativa
  source 1..11516: mol_type = genomic DNA
aagcttgaaagtgtgtgaagaaatgaagaaagtgaagtctacttataggacaggtataacggttatgagaagtggaaatgtccgaactgccccgcaaccgccatcagggagtgatctggagcgtccacgccaaaccccaggatcaacggtgatcaccagggttcggctgaacctgggctgggccagatggcttccaaacctagtctgggtctcctcctcgacctgccttatccaattcttgcaattttgggatgtttctttagtagtttaaaagcccattcttgcattgatagatttctccttcacttttagtctggatttcctcccaacttctgggtttatcacctgcataaaaatatacatcaacaattgtggaatatgtgagttttaacacctatcactatgttggatattttattatctggactttatgcagacgttgacggtatagatttggcatttaacagtcgccaacattatacaatcgggtaaatagtattgatgtattccatgaatctgtgtatagaaggtatgccatatccttgacactgacaccatatgtgtttccgtttttgagaaaacatttccatttccaaaaatttctgaccaacactctctatttccgaaaactcatctgaaatccgaaaacttttcaaaccgttttcatcccagtaatgaatggcaggctctacgtgcagacccacaaatgctccacaaagatctcaaaaaatttatcgtataaatttcatacgtagactaaatttcacaaaaattcacttgtgtacccattgaggtatgtattttgttttcaaaaaaaaacacagtttaccttgtggtgctcgggacatcggccggagctcatgatcataatggagtcagtcagggtggctactggagcttatggcggaggaggtcagggtggtgggacgtggggcagagtttagtccggtcggcaaccagagctccgagaggagatctgggcagtagtgagagaagggtcaggaggcgccagagtggccacgacggaggctgggaaagcgatgccgaacagcaaagcatgcgttgaagtaggcggggtggcagcagcctcggggcggagcgggcatggaacaagggtagagctggagtcggtggccggctactgagaccattcacagtgcgtcaccaagttttgatattcttcacatgccacgtagatcagagcggtattagccacatgttacatagtgcaaaactctacaagaccacatatgggttgcttgtagtgggtcccactaataccacttttacacttctctttttacttttcccctctcctctctcccctctcttcctttccccaccggccaccgcagagagccgggcggagacggaggttgcgggggtcgggcggagcggcggctcaagcggaggtcgtggaggcgagcaggagacggcgccgggccgagtggcgacggcggtggggcctagcaccgtgcctcccctcctcctcctcctctagtggtggcgaatcgaggaagccgccgccgccgcgccccacctcttcatctgatgcgggcgggaagctgccgccaccgccgtcgggcagatccagatctccggcctccgtgtcgggcggctacgcggcggcgggcgtcggcgtcggtcagcgccctcctcacctggccagcccaccgactagccctaccgtcgtcatcatccctggtcagcaccctcctcccctggcattcggctgcctcacccctctcctctctctcctctagcggtggtgtgggtcccacctgtgggtccctctgagacgaagaacgcgtagtcaactttggctacgcgcggagctgaggaacgcacacgattggataaagtggcaaaggaatatttgcttttttggttgaggctaaatgctacgtagatctactgtgaatggcctgatggcgcagcggctctcttgcgggacagagtgggacgtgcacgacgagaaatttcctcttgcatgaataacccacggatgtaggcctccttaactaggagctacgaggtgggatttgggaggctttttctatttcaaggcttaaagcctatccaatatgatctctaatcttaaaatttagtgtttatttttgaaaaaaagttggctccaataattttcctaattagcttccaaaaattggaatcttactccctatccttctcgctctccactagtggagaagcgtgctagttcttaacacacgcatgggtggagggatcacatggatattatggaaatatcctcatggactggtgattaacatagtcctactaggagagaattgagtttattctatatcgttatcgacgtttggtatcacgactacgttatttggatggtatggggatcatcggtactagagtatatgcgagattgaggtaaaagagatggagacagatatttttatactggttcgccccttatctaacaggtaatagccctacatcctgttggctaaagccggtattgctcttattcatctgaatcgcacaagtataatatttaggataacctgtctagctgtcatcgacttggcggcatggataaccaactcgtagtcgatgacggggtagtatttctcttcgaatatgaactcgtcgagatcagagatggctctagatctctcttgccggtctcaggaggcaccagatggggtatgcctaggctaatctctaatgtcgatatttagcggcgtattggcttgtgtgtatgttatgtgttgtggctcgtcatctctcctcctagggggcttgtatttatacccatagatgcccccttgtctaagtagaactagggagataaatatggatacgatccgagtagtccttgtcgtttccatatagaactctttttgtcctttcttatccgaaactccttttatatacgaggtatgattccatataagacatggtatatggtgggccctgccgagcttagtcaggaatgtggtatccacaaccctgacaatcatgcagggttcattgtctccgagttctacgcggagactaagacaactcaaggtataaaaggcgcactctctaaggggttcaaaagagcaaatcatagcacgaacacacccaccatagtttacgaagccagaggctgtgaagcctactcgccaggagatcttgtcgactcatctcgacaaggatctcgccggtaacgctggattcatctcttctctttgtactccgtggtttccatatcaatctcatataaactggattatggttattatcttacgaggggtctaaaccagtataatctttgtctctctgattgttttaatatcgtatcatgtagatcctcataccaacttaccctaatacactatttatccgatctacaggtatcccctatcgacaataggtatataagatattataaaaaagatggagacatatgtgagctgatgatttaggctgcattcgttgcagcttctttccaacccatctccctcgttttccgtgcgcatgcttttcaaactgctaaacggtgcgttttttacaaaaagtttatatacgaaagttgcttaaaaaaatcatattgatccattttttaaaaagatagcaaaaaattaagtaatcacacgctaatggactactctgttttccgtgccggaggatagctttcccaacccagggaaacgaacccaaccttaggtgtgttcattgctaggtgttcccaacccctctcccttatattccgtgcgcatgcttttcaaactgttaaacggtgtgtctctttttaaaaaatttctatacgaaagttgctaaaaaaatcatatcaatacatttttgaaaaaaaaagctaatacttaattaatcacgtacgtactaatagaccgcttcgttttctatgcgcagaagatttgttcccaacccccacaacaaacacagccttaacatgcttgcatttaaaaagctataaaatttaataaattataaaattatagataatataacatgcttacttgatgtgacactttacctgttaagttttaggagtcggtgtttagattcaaactttttttttcaaacttccaacttttccatcagatcaaatgtttgggcacatgcattcagcaataaatgtggacaaaaaaaaaccagttgtacagtttgcatgtaaatcacgagatgaatcttttgagcctaattacgtcatgatttgacaatgtggtgctaaagtaaatatttactaatgacagattaattaggtttaatagatttgtctcgcagtttacaggcgaaatatataattttttttgttattagtttatatttaatacttaaaatgtatgtccatatacttaaaaaaattttgtaccacgaactaaacacagccaagtggactctaactctctctctctctatatatatatatatatatatatagtaatgtgttcgtatgtcctggatagaaactcatttcctccgcatagaaaacggagcggtctattaatacgtgattaattaagtattagctatttttttcgaaaataaattaatttaattttttaaataacatttatatagaaactttttaaaaaacacgttgattaaccatttgaaaagcgtgcgtgcacgcggcgtgaaaaatgaggcagagatgttgtgaaaaggagtgccgaacacagtcaaagcctcaggtggtgtttggatccagggacttaacttaaactttagtccctatatttagacactaatttatagtattaaatatagactacttataaaactaattacataaatgaaagctaattcacgagacaatttttttaagcctaattaatccataattaaagaatgtttactgtagcatcacataggctaatcatggattaattagacttaatagattcatctcgtgaattagtccaagattatagatgggctttattaatagtctacgtttaatatttataattaattttcaatccaatatgataggacttaaaatttagtcccatctacagggtcagaggattcggtcggtctcagggcagtcctctccgtataacgcagcgcccgatattttttatgggcataaatagtctgattgctactgtagcattttgttcaactaactccccaatgggcaatggctagtcgtcgagtgtcagtagtcaagagtagactccgcttcgcttcgccgtaccttctctcttctcgttctcctatttcacaaatcacaaccggattgctttcttccttcctccggtctggtccccaacctccgcggcagccatggttggcgccgagatgcttgtggccgcggcggtgagccaggtcgcccggaagatcaacgacatcgtgggggtcgcgcagggcgaggtgaagctgtgctgcaatttcagcgacgatttggagggcatcaaggatacccttgtgtacctggaaaccttgctgaaaaatgcggagaataactccttcggaagcgacagggccaacctgcgccactggcttggccagatcaagtccctggcttacgatatcgaagatatcgttgatgggtactactcttccaaggagcagttcgatgggggcagctatgcacagaaggtaacagaatctcattcctttttcttcatcggtaaaatttcttcaatttcaactcaattttagaatgccccgcaaaaaaaaaatcaattttagaatggatctacattaatgagatgtagaggtgtattactatgggcaggggaagcaccgtgtgtgcatccttagttactgcataggcaataagttatcctttccattgtccaaaaaaattttgaagcaaggaggaaaagcttgaagcttagtcttttagttttttctttttgattattttgttatttatctcagttatgagattaggagtgtatatgcactcgtgtagcttttgtctgtgtgtggatatagaggctggatttctatccattatcttaaataaattgtccaagaaatttatcaggggaaatgcagttagatgcaccattagaattgcttcattgcctgtggaagagtggaacagctctgagaattgtgattatgttttatatatttaaacaatattgattactagtactagatttactctctttttttttccttatgaaattccttgatactggtagtagtgagagataaacctaataattacatgccacatacctgtagattgtactatacttcaacacccttttgcaaatagtgagagataaacctaatacttacttacatgccacatcgtcagagcactcaattcttttttgttttggtaagcaatcagcttttgcctttacatagacaaaaattgatcgacgaatattttgaaaaaaaaaacctttgtatttatatggaaaagaaaatgcaaggtactttaccaaacaattgtgcatctatgatctatctgctatgtaggggttgataccggccttggttccttgctgcaccaactgttatttacctatctccatttttgttcttccagcaacaatagtatcaaaatactaaatgtctttcctgactaaggctaccttcataaatttacaggggtcattattctgctcgctatccaatccaatgcttctgaaaggtagcatggtttataagatgaaatccaagagagagatgctacagcaaagccaacagttgcccaatcagtatcatttcctttcatatatcaattcagctgtgcattattttgaggagaagcaaacaacatcatacagaaatactgacattgcaattgtcgggagggatgctgatttggatcatctcatggatcttttaatgcaaaacagcgctgaagagctttgtattatacccatagttgggcctgtaggttttggaaagacaagccttgcacagttagttttcaatgatacaagaacagaggtattcagctttaggatatgggttcatgtttccatgggtaatatcaaccttgaaaaaattgggagagatatagtttcacaaactacagaaaaaattgagggaaatatgcagctgcagtcaatcaagaatgctgttcagcgtgtgctaaataaatatagttgcttgatcataatagacagcctttggggaaaggatgaagaagtgaatgaattgaagcagatgttgcttacaggtagacacacagaaagcaagatcatagtgaccactcatagcaataaagtagctaagctgatttccaccgttccactgtacaagttggcagctttatctgaggatgattgtttaaaaatattctctcaaagggcaatgacaggtccgggtgacccgttgttcagggaatatggagaagaaatcgttagaaggtgtgaaggcacacccttggtagccaattttctcggttctgtggtgaatgctcaacgacaaaggcgtgagatttggcaagctgcaaaggatgaagaaatgtggaagatagaggaagattatccccaagacaaaatttcaccactatttccatcattcaagataatatattataatatgccccatgagctaagattatgctttgtatattgttcaatcttccctaaaggaactgttatagaaaagaagaaacttattcagcaatggattgcacttgacatgattgagtccaaacatggaaccttgccacttgatgtaactgcggagaaatatattgatgaacttaaagcaatctatttccttcaagttttagagcggtctcaggtaagttcatgggttgctttttaccttctgtacatatcctatgtaactagaatgtggttaaatatctccattaagcatagtagcttataccattgttttatttctaaattctcaataagtttctgtaagaagattgaccatgatagaatggccaatagtgatatctcaacaaacaagtaacactgttttcctccacagaatgatgcagaaagatccagtgcttctgaggaaatgcttcgcatgcataacttggctcatgatcttgctagatcggttgctggtgaagatatccttgttattttagatgccgagaatgagcgcaatgccagatattgcaattaccgttatgcacaggtgtctgcttctagtttagagtcaatcgatcgcaaggcatggccttccaaggcaaggtcactaattttcaagaatagtggtgtggactttgagcatgtcagtgaagttctttcagtgaacaaatacctgcgtgttttggatctcagtggatgttgtgttcaagatattccatctcctatctttcagctgaaacaattgagatacctcgacgtttcatctttatctattacagcactccctctgcaaattagtagctttcataagttacaaatgttggatctttcagaaactgaactaacagagttgccaccctttataagcaacttaaaaggactgaattatttgaatctccaaggttgccagaaacttcaacgattgaatagccttcatttgttgcatgatctacattacctaaacttgtcatgctgccctgaagttactagttttcctgaatctattgaaaatctgaccaaactccgtttcttgaatctttctggatgctctaagctttcaacattacctatcagatttttggaatcatttgctagcctctgttctttggtagatcttaacttaagtggctttgaattccaaatgttgcccgacttttttggcaacatatattcacttcagtatttaaatctgtcaaaatgtttgaaacttgaggtattaccacaatcttttggccaacttgcatatctgaaaagcctaaatctttcatattgttctgatcttaaactgctggaatcctttgaatgccttacctctcttcggtttttgaatctctcgaactgctctaggcttgaatatttgccatcatgctttgacaagcttaataatttagagtctctgaatttatcacaatgtcttggacttaaagcactacctgaatcacttcaaaaccttaaaaatcttcagcttgatgtttctgggtgtcaggattgtatagtacaatccttttctctaagtaccagaagttcccagtcctgccaacggtcggagaaagctgagcaggtcagatcaagaaacagtgaaatttcagagatcacttatgaggaacctgctgagattgaacttttaaagaataatccaagtaaagatttggcctccatctcacacctaaatgaggatagaattgaggagcctgaagttgtcactgaggtaaacttacattttattaaagaaataaaaacaatttgcctagtgtttcctttgaaatttccttatgtcaatacttaatttatctttgatagatttgagttactggtgattgagaaagttgtatgccaatttgaaccagtttctcactaccaactgaaaatgatgacgaacggaaactttattgtagttgtgctcgaattgaagatcccttttctaatgaggtgatctaattgggtaccagaacatgaatcatacttttttcagtagttcttaacatttcgtagagaaaatacatgagtgttccttcaattaaaaaactccctagaggccagcaagttataaatttaaatgggattctccttattacctagatttatgttttcagaaaattttgtaatatcatactaactaattgtccatgtccttgtttcttgatgtagccaagtgcaactagaggtatggtacaacagattccaggaaaccagctctcatcgccttcatctcatctttcttcctttgcatcaagctcagcgccatttgcatcctcctcttcggacacctcaacaagtgagcatccagtgcctaatgaagaggcggcaggtatggtacttcaaataattttctcccgatttaatcatctcaagatgaggttcacttctttatttgaatataccattataaggaaatagatcatgcgccctcttgtttaaaggaatttgatgtttttttatattcgctctctttgagatatacctgtcatccagcagtggtaaaaaggatagtatatagctgacaaatatgttcatataatttccttgtgggtaattttgatattctctttctatcttaatacgtgttatgagcaccggctaatgaccgaatggggtatgaatggaacaccggaggtcgaggcttttggcagcctcttcgacgtctggcccatgatcggcgacgaaagcaaaagcaggggatgagagagtagagaattggagacgagactatagattgaatcttgcttggttcattcatgatttcgtggcccttaattaggcttacgattgaactgaattagctaataaaaaaggataacaaagtcttctctaaatgtaagcaatcggatcactatcgctcgtccggcatgccgcgtcagttttcagctcgcgtgatctccttcgacgccgcttggaccggttgctgcatccgcgtagttgcgtttcttcatgtagacgattccgaccctttacattacaactacttggaattctttgagtgttctaaaataatttggatagtggtacatatgtggttacattttcttaatggtgacatatagccaagttggactaagattaattttaatttgtgtggaatgagaaagagtcaagacagtttgatacgtagaagtttgcatattcagaaccttatactggtttgtcttggtttattttcttgacaatgcagctttgacagttcctcggtccaaagagaaatgcgacaacactcccatgccggtaaaagatggcctgatatctgaagatgatgcaccggtacatctgcatcagaagcccctgcaggcgacagccatggcagccatatgactgacctgtaatcctacaagaaaccaactgaagattcatatgtggactgagtgaaattatgaaagttattggaataaattgttgctctgtatgtgagagcaagcttcagtccgttagcctggttccttttagtagtgttctactattgggagatcttcatcaacattttacatgaaacgtgatgtaatgaacctctgttaattgttaattgtcagagctctagttttttgtggtataaattttgttgcaagggggcaatgcactcaacttttgaatcatttgattggtatggaaatcattgcatttgtgcagagttcaggcagagttcagttcttgcatttgcacatcgtattactattacctggccttgtttggcacatctccagttccagctccacctctcctagagctggagctcagccaaacagtttcagctccaccgaaaatgggagcggagctgggtggagcactctaacaaaatgaactagagaggtggagctaggttaagctgttccacaactccacttcagatctaactcctaaagttaaatttaaaagttgaagctctaccaaacgagaaaacggacgatatgccactgtataggttgggttcgaatgaaatgccactcaatacaatgtatcggataaaatgccactcaatacgttgcctattggatgaaatgccac

SEQ ID NO: 407 - protein, 1388 aa, Malus X robusta
MGGEAFLVAFLQVLVDKLAHREVFKYFGLVKGVDQKLKKWSATLSAIGAVLNDAEERQLTAKNNTLKLWLEDLRDLAFDVEDVLDKYATKMLKRQIQHAHSRTTSKLWNSIPDGVFNFNMNSEIQKISERLQEISEQKDQLNLKIDTGALTTRARRNISPSSSQPDGPVIGRDEDKRKIVELLSKQEHRTVNFDVVAIVGMAGVGKTTLAGQVLNDMVATQTFQPAVWACVSDDFNLERVTKQILESITSRQCTTEDYNKVQDYLHKELAGKKFLIVLDDVWKTCSYGEWMKLQSPFRDGAQGSKIIVTTRDTDVSKMMGAATLVHNLEPMESSVCLQVFEQHAFLNSNDDKPPNYELLKEKIAAKCRGLPLAARTLGGVLLRKDTYEWEDILNNKLWSLSNEHDILPVLRLTYFYLPSHLKRCFAYCSILPNDYEFEEKQMILLWMAEGFILPRPEDKKQIEDLGADYFRDLVSRSLFQKSTKCISKYVMHDLIGDLARWAAGEICFRLEDKQNDDGEQLRCFPKARHSSYIRGLSDGVKRFEVFSELKYLRTFLPLRKDSFWNYLSRQVAFDLLPKLQYLRVLSFNCYKITELPDSIGDLRYLRYLDLSYTDITSLPKSTSTLYNLQTLILEGCSKLKALPIDMSNLVNLRHLNNSNVSLLEDMPPQLGRLVNLQSLTKFVVSGGGGGDRSGIRELEFLMHLRGTLCISRLENVTDVEDAQRANLNCKERLDSLVLEWSHSSDTRETESAVLDMLQPHTKLKELTIKSYAGKEFSSWVGVPLFSNMVLVRLEECNNCLSLPPLGKLPHLKELYIRGMNAVESVGAEFYGECSLPFPLLETLEFVDMQHWKVWLPFQTDHRGSVFPCLKTLLVRKCSKLEGKLPENLDSLASLEIVKCEELLVSIANYKQLRQLNIDGCKGVVHTAAKVEFELLESLYLSNISELTSLQTGELCRNGLNMVRDLKINGCEELTSSLKNEAILLQQLISLGRLEIEDNSLLVEELGKEADELLQLQILGCKLEFLKLKKCKNLLKLPEGLNQLSSLQELRIHECSSLVSFPDVGLPPSLKDIEITECHSLIYFAKSQIPQNLRRIQIRDCRSLRSLVDNEAVGSCSSSSHNCLEYLNIERCQSLTLLSLSDQLVRALRELDIYDCEQLEFLAPDGLFCNNTNYFLENFRIRRCQNLKSLPRLSGGIRGSNLREIRITDCDRLEALPEDMHNFNSLEKLIIDYREGLTCSFPANLTSLMIWKVKSCKSLWELEWGLHRLTSLRYLWIGGEDPDMVSFPPDMVRMETLLPKSLTELSIGGFPNLKKLSSKGFQFLTSLESLELWDCPKLASIPKEGLPLSLTELCIYGCPVLKERCQPGKGRYWHKISHIPYIDIDWKMI

SEQ ID NO: 408 - protein, 16 aa, synthetic construct
MWVLCLFCWPTYTHGS

SEQ ID NO: 409 - protein, 6 aa, synthetic construct
MHMYLK

SEQ ID NO: 410 - protein, 10 aa, synthetic construct
MSYKLHVVPW

SEQ ID NO: 411 - protein, 7 aa, synthetic construct
MSATPQV

SEQ ID NO: 412 - protein, 8 aa, synthetic construct
MRKHNWHI

SEQ ID NO: 413 - protein, 29 aa, synthetic construct
MRKHLQHTYILSFSLSLSLIPAQLCGRRE

SEQ ID NO: 414 - DNA, 66 bp, Dichanthelium oligosanthes
  source 1..66: mol_type = genomic DNA
aatttaactccgcctatgttgtctcaacatagccggtcccaagcccggataaaggaggagggggtt

SEQ ID NO: 415 - DNA, 61 bp, Solanum lycopersicum
  source 1..61: mol_type = genomic DNA
cttgtaactccgcctgtcaagtcacagccggtcccaagcccggaaaaaggaggagggcaag

SEQ ID NO: 416 - DNA, 52 bp, Sorghum bicolor
  source 1..52: mol_type = genomic DNA
tgcttaacactgccaatgccggtcccaagcccggataaaagtggagggggca

SEQ ID NO: 417 - DNA, 52 bp, Sorghum bicolor
  source 1..52: mol_type = genomic DNA
tgcctaacactgccaatgccggtcccaagcccggatagaagtggagggggca

SEQ ID NO: 418 - DNA, 52 bp, Sorghum bicolor
  source 1..52: mol_type = genomic DNA
tgcctaacactgccaatgccggtcccaagcccggataaaagtggagggggca

SEQ ID NO: 419 - DNA, 80 bp, Oryza sativa
  source 1..80: mol_type = genomic DNA
tatgtaactccgcctatgtcatcttaagtttatctaaatgatatagccggtcccaagcccggaaaaaggaggagggtata

SEQ ID NO: 420 - DNA, 43 bp, synthetic construct
  source 1..43: mol_type = other DNA
nnnnnnctgatgagtccgtgaggacgaaacgagtaagctcgtc

SEQ ID NO: 421 - DNA, 59 bp, synthetic construct
  source 1..59: mol_type = other DNA
acttgtccacaatcttttctgatgagtcgctgaaatgcgacgaaactcgatatgttcaa

SEQ ID NO: 422 - DNA, 171 bp, Bacillus subtilis
  source 1..171: mol_type = genomic DNA
cctataattatagcgcccgaactaagcgcccgaaaaaaggcttagttgacgaggatggaggttatcgaattttcggcggatgcctcccggctgattatgcagatcacagccgtaaggatttcttcaaaccaagggggtaactccttgaacaaagagaaatcacatgatctt

SEQ ID NO: 423 - DNA, 68 bp, Hepatitis delta virus
  source 1..68: mol_type = other DNA
ggccggcatggtcccagcctcctcgctggcgccggctgggcaacatgcttcggcatggcgaatgggac

SEQ ID NO: 424 - DNA, 186 bp, Otolemur garnettii
  source 1..186: mol_type = genomic DNA
ggcgctgtgtcgcaatctgcgaagggcgtcgtcggcccaagcggtagtaagcagggaactcacctccaatgaaacacattgtcgtagcagttgactactgttatgtgattggtagaggctaagtgacggtattggcgtaagccaataccgcagcacagcacaagcccgcttgcgagattacagcgc

SEQ ID NO: 425 - DNA, 52 bp, Chicory yellow mottle virus
  source 1..52: mol_type = other DNA
caacagcgaagcgcgccagggaaacacaccatgtgtggtatattatctggca

SEQ ID NO: 426 - DNA, 52 bp, Arabis mosaic virus
  source 1..52: mol_type = other DNA
caacagcgaagcggaacggcgaaacacaccttgtgtggtatattacccgttg

SEQ ID NO: 427 - DNA, 50 bp, Tobacco ringspot virus
  source 1..50: mol_type = other DNA
aaacagagaagtcaaccagagaaacacacgttgtggtatattacctggta

SEQ ID NO: 428 - DNA, 52 bp, Chicory yellow mottle virus; identical to SEQ ID NO: 425
  source 1..52: mol_type = other DNA

SEQ ID NO: 429 - DNA, 52 bp, Chicory yellow mottle virus; identical to SEQ ID NO: 425
  source 1..52: mol_type = other DNA

SEQ ID NO: 430 - DNA, 50 bp, Tobacco ringspot virus; identical to SEQ ID NO: 427
  source 1..50: mol_type = other DNA

SEQ ID NO: 431 - DNA, 68 bp, synthetic construct
  source 1..68: mol_type = other DNA
ggagagagaagtcaaccagagaaacacaccaacccattgcactccgggttggtggtatattacctggt

SEQ ID NO: 432 - DNA, 526 bp, Oryza sativa
  source 1..526: mol_type = genomic DNA
ctacggacttgattgtattgagccttggtatggaaacctgctaagtggcaacttccaaattcagagaaaccctggaattaaaaaaggggcaatcctgagccaaatccatgttttgagaaaacaagcggttctcgaactagaacccaaaggaaaaggataggtgcagagactcaatggaagctgttctaacgaatcgagttaattacgttgtgttgctagcggaactcccttctaaattagggaaagaagggctttcgaaatctaatacacacgtatagatactggcatagcaaacgattaatcacagaactcatatcataatataggttctttaattcttttttaaaatgaaaataggaatgattatgaaatagaaaattcataatttttttagaattgttgtgaatccattccaatcgaatattgagtaatcaaatccttcaattcatagttttcgaaatctttttaaaagcggattaatcggacgaggataaagagagagtcccattctacatgtcaatactga

SEQ ID NO: 433 - DNA, 526 bp, Oryza glaberrima; identical to SEQ ID NO: 432
  source 1..526: mol_type = genomic DNA

SEQ ID NO: 434 - DNA, 74 bp, Nicotiana sylvestris
  source 1..74: mol_type = genomic DNA
gaaagtcgtattcgatgaaagtcgtatgtacggcttggagggagatctttcatatatttcgagatccagcctac

SEQ ID NO: 435 - DNA, 130 bp, Solanum lycopersicum
  source 1..130: mol_type = genomic DNA
gagagccgtgtgatgggtgactatccagcacggttaagagagcacttttagtctgctctggtgaatggaagccccctatcatgcaataaggaagcagctcttctcacagcggagtcaccgttgactttat

SEQ ID NO: 436 - DNA, 77 bp, Hordeum vulgare
  source 1..77: mol_type = genomic DNA
gaaagccgtatgctttggaagaagcttgtacagtttgggaaggggttttttgagagaaaagaagaatctacttcaac

SEQ ID NO: 437 - DNA, 79 bp, Hordeum vulgare
  source 1..79: mol_type = genomic DNA
aggagctggatgagaagaaactctcatgtccagttttcgagtagagatggaactaagaaagagaaccatcgactataac

SEQ ID NO: 438 - DNA, 79 bp, Capsicum annuum
  source 1..79: mol_type = genomic DNA
aggagccgtgtgagatgaaagtctcatgcacggttttgaatgagagaaagaagtgaggaatcctcttttcgactctgac

SEQ ID NO: 439 - RNA, 43 nt, synthetic construct
  source 1..43: mol_type = other RNA
ccaatcgtggcgtgtcggcctgcttcggcaggcactggcgccg

SEQ ID NO: 440 - RNA, 49 nt, synthetic construct
  source 1..49: mol_type = other RNA
gagacggtcgggtccagatattcgtatctgtcgagtagagtgtgggctc

SEQ ID NO: 441 - RNA, 132 nt, synthetic construct
  source 1..132: mol_type = other RNA
gtgctcgcttcggcagcacatatactagtcgaccgccagatgccttgtaaccgaaagggggaagaggaaggaggtctgaggaggtcactttcccgaaaggatggcgtctagagcggacttcggtccgctttt

SEQ ID NO: 442 - RNA, 40 nt, synthetic construct
  source 1..40: mol_type = other RNA
ggcacgtacgaagggacggtgcggagaggagagtacgtgc

SEQ ID NO: 443 - RNA, 41 nt, synthetic construct
  source 1..41: mol_type = other RNA
ggcacgtacgaaggagaggagaggaagaggagagtacgtgc

SEQ ID NO: 444 - RNA, 46 nt, synthetic construct
  source 1..46: mol_type = other RNA
ggcacgtacgaaggaaggattggtatgtggtatattcgtacgtgcc

SEQ ID NO: 445 - RNA, 45 nt, synthetic construct
  source 1..45: mol_type = other RNA
ggcacgtacgaaggaaggtttggtatgtggtatattcgtacgtgc

SEQ ID NO: 446 - RNA, 42 nt, synthetic construct
  source 1..42: mol_type = other RNA
ggcacgtaccgagggagtggtgaggatgaggcgagtacgtgc

SEQ ID NO: 447 - RNA, 83 nt, synthetic construct
  source 1..83: mol_type = other RNA
gggaagatacaaggtgagcccaataatatggtttgggttaggataggaagtagagccttaaactctctaagcggtatcttccc

SEQ ID NO: 448 - RNA, 52 nt, synthetic construct
  source 1..52: mol_type = other RNA
ggctagctggaggggcgccagttcgctggtggttgggtgcggtcggctagcc

SEQ ID NO: 449 - RNA, 98 nt, synthetic construct
  source 1..98: mol_type = other RNA
gacgcaactgaatgaaatggtgaaggacgggtccaggtgtggctgcttcggcagtgcagcttgttgagtagagtgtgagctccgtaactagtcgcgtc

SEQ ID NO: 450 - RNA, 95 nt, synthetic construct
  source 1..95: mol_type = other RNA
gatgtaactgaatgaaatggtgaaggacgggtccagtaggctgcttcggcagcctacttgttgagtagagtgtgagctccgtaactagttacatc

SEQ ID NO: 451 - RNA, 100 nt, synthetic construct
  source 1..100: mol_type = other RNA
ggagacgcaactgaatgaaatggtgaaggagacggtcgggtccaggtgcacaaatgtggcctgttgagtagcgtgtgggctccgtaactagtcgcgtcac

SEQ ID NO: 452 - RNA, 57 nt, synthetic construct
  source 1..57: mol_type = other RNA
ggatgcgccttgaaaagcctgcttcggcagctggtgaatgacagctatggcgcatcc

SEQ ID NO: 453 - DNA, 44 bp, Pea early-browning virus
  source 1..44: mol_type = other DNA
attcaattaattcaatagaattaattctcgtattaatatgacaa

SEQ ID NO: 454 - DNA, 45 bp, Tobacco rattle virus
  source 1..45: mol_type = other DNA
attttatcactcttataagagtgatactcgtattaatatgaccaa

SEQ ID NO: 455 - DNA, 45 bp, Tobacco rattle virus
  source 1..45: mol_type = other DNA
attcaaagattacaatagtaatctctaccgtatttatttgacaaa

SEQ ID NO: 456 - DNA, 45 bp, Tobacco rattle virus; identical to SEQ ID NO: 455
  source 1..45: mol_type = other DNA

SEQ ID NO: 457 - DNA, 45 bp, Tobacco rattle virus
  source 1..45: mol_type = other DNA
attcggtagtgtgaaaacacattacctacgtattaatatgactaa

SEQ ID NO: 458 - DNA, 38 bp, Pea early-browning virus
  source 1..38: mol_type = other DNA
ttatggtctaagataattcttcagaccctcgtaatttt

SEQ ID NO: 459 - DNA, 38 bp, Pea early-browning virus
  source 1..38: mol_type = other DNA
cttaacaagaatcttatcaagattctgttcgtattcta

SEQ ID NO: 460 - DNA, 38 bp, Pea early-browning virus
  source 1..38: mol_type = other DNA
caaggtatatgcgaaacacgcgtaataccttcgtataa

SEQ ID NO: 461 - DNA, 211 bp, Tobacco mosaic virus
  source 1..211: mol_type = other DNA
gaaaaaagagtgatgtccgcaaagggaaaaatagtagtaatgatcggtcagtgccgaacaagaactatagaaatgttaaggattttggaggaatgagttttaaaaagaataatttaatcgatgatgattcggaggctactgtcgccgaatcggattcgttttaaatatgtcttacagtatcactactccatctcagttcgtgttcttgtca

SEQ ID NO: 462 - DNA, 135 bp, Tobacco mosaic virus
  source 1..135: mol_type = other DNA
ctttgtgatgttgctgtttcgttgaacaattgtgcgtattacacacagttggacgacgctgtatgggaggttcataagaccgcccctccaggttcgtttgtttataaaagtctggtgaagtatttgtctgataaa

SEQ ID NO: 463 - DNA, 43 bp, Cucumber mosaic virus
  source 1..43: mol_type = other DNA
ttctcatggatgcttctccgcgagattgcgttattgtctactg

SEQ ID NO: 464 - protein, 10 aa, synthetic construct
  VARIANT 2: note = X is R, G, or F
  VARIANT 3: note = X is Y or G
  VARIANT 4: note = X is A or F
  VARIANT 5: note = X is Y or V
  VARIANT 8: note = X is any amino acid
KXXXXILXFY

SEQ ID NO: 465 - protein, 9 aa, synthetic construct
  VARIANT 3: note = X is L or F
  VARIANT 4: note = X is Y or I
  VARIANT 7: note = X is any amino acid
IVXXVLXNL

SEQ ID NO: 466 - DNA, 82 bp, Nicotiana tabacum
  source 1..82: mol_type = genomic DNA
agacgcatccatggctgaatggttaaagcgcccaactcataattggcgaattcgtaggttcaattcctactggatgcaaaga

SEQ ID NO: 467 - DNA, 384 bp, Apple latent spherical virus
  source 1..384: mol_type = other DNA
tccgttttagagcttgtgagttgttattacgttttgttgtttgaatctctgttttgttactctgatttccttcacgtttgcaccttacactctctaccgataaacattatcatcttttattttgaattttatttgaaaaatttttatattttcaatgtcaatcactactcctgtagtgattcgctttgggagttttgactcccctgctgcggcacagattgccgatactaaggaggaggaaactcctctctctcgccttgcagctttaaatcgcaaggctcaaattgctgctcgttcaagagtagcagctgctgcggcacagtatgccgaagagcaggagacactagttctcactgctcaatccatgagggatgctctcccttt

SEQ ID NO: 468 - DNA, 311 bp, Apple latent spherical virus
  source 1..311: mol_type = other DNA
tcgttttagagtttatgagaactgtgcgttgtttgtttcaagttccttttgttctgtttcttgccatcatctcaccttttctcatatcctctaccgataaacacccaatcctttcttctttaaacaatctttgtattgttttcttattttttatattttcttatcttgatactcatctctcgggtatcctctttgaccttcgcaagaaggccatctttgatcgcttggatcgttaccaagccatccctcttcctcctccattgccaatcttggcaatttctgttttccctctttcctccccttcttctcaa

SEQ ID NO: 469 - DNA, 188 bp, Apple latent spherical virus
  source 1..188: mol_type = other DNA
tttgtttggtctttcttccttcttttctttctttctttcttttgaactagtttgttctcgtgatccttggatccgttaaggtttcttgctggttcttccttaagatgagaacatgaaccagtctagttctttttgtttgctgtttattttatttcagtgtgtttgaaaagagtcggatagtccaatcc

SEQ ID NO: 470 - DNA, 187 bp, Apple latent spherical virus
  source 1..187: mol_type = other DNA
tttggtctttctgctatctttgagtccttttctttttctctttcttttgaactagtttgatctcgtgacctctggtccgttaggtttcttgctggctcttcctaagatgagatcttgaaccagcctagttcttttgttgcttttgcttttgctttagtgtgctcaaaaatgtcggatagtccaatcc

SEQ ID NO: 471 - protein, 709 aa, Apple latent spherical virus
GPEQMYIPTARSESFGSVCLLGKWTGPKPYFLENSSLTPSLIHDCIDIDMTTEPAILSKKDPRLQYTNNKDFDPFLSGMGKYAVEAHSFDEDEELFEDALDRVFSEIPMFTCEDLSNDQVCNGIEDDDYAEGLVMQTAEGYPFCTMRPPGVTGKTWLFAGSPGDWHIVPNSLLANELNVKELNLSKNIFEPVIGIDFPKDEKVDSSKVYIKQKTRLFTILPVDYNILVRKYFLSFVSQLMALHNEVPTKVGIDPISNEWSILCHSLHSKGTNWFNGDYSRFDGITPRNVLQGIVKRISRRYANKSSFAITDPTLSINGDLARSLLMDMCSTRYGLTNGDLWYVTSGIPSGFPLTVIVNSLVNSFFVHFAYMKLHSSEVHKALYPLYSFRTLVSYAVYGDDNLISVHDTIKDTFNLVTISNLLLEHGVTLKNGADKNEEILSPFYPIEKVDFLKRRFTTLQGHIVAPLNTVNITERLHWVRKGLGDADATLENCKSALFEALFHGELYYNDLRGKIEKACKVKGLPLIVPDYQDALSLFLTGGSYAKAIQAIAMNLPDRISLYKSEFYSVQIYPQIFYVTNERNVTLQKLLETTTLRNICYVSRNYESRSSSRGLFTLKGEGWTPAALKARLSVYKAMAKPVYFVDEANDGLAMFYCLDYAFRVCGLTRSQIAKILNAVFGGNPEVCQRIFQFFSQVEPTNKYIPPNQRR

SEQ ID NO: 472 - DNA, 2127 bp, Apple latent spherical virus
  source 1..2127: mol_type = other DNA
ggacccgagcaaatgtatataccaactgctcgatctgaatcctttggatcagtctgtcttcttgggaaatggactggccctaagccttattttttagagaatagttctttaactccctctctaattcatgactgtatagatatagacatgacaacggagcctgctattctttctaagaaagatcccagacttcaatacactaacaataaagattttgatccttttctctcaggtatgggaaagtatgctgttgaggctcactcctttgatgaagatgaagaattgtttgaggatgctctagatcgagttttctcagagatacctatgtttacctgtgaagatttatctaatgatcaggtatgcaatggtatagaggacgatgattatgctgaaggattggttatgcagactgctgaaggttaccccttctgcactatgcggcccccaggagtcacaggaaagacgtggctttttgcgggatcaccaggtgattggcacatagtccccaattctcttcttgctaacgaacttaatgtcaaagagttgaaccttagcaagaatatttttgaaccagtgataggtatagattttcccaaggatgagaaagttgattcttctaaagtgtacataaaacaaaaaactcgactttttactatcctacctgttgattataatattttagttaggaaatattttctttcttttgtttcacaacttatggccctccataatgaagttcctacaaaggtaggtattgatccaatttctaatgaatggtctattctttgtcattctcttcactcaaaaggaaccaattggttcaacggagattattccagatttgatggaataacacctcgtaatgtgcttcagggcattgtgaagagaatttcgcgtagatatgctaacaagagttcttttgctataacagatcctacactttctatcaatggtgatcttgctagatcccttttgatggatatgtgtagcactcgatatgggctaactaatggggacctttggtatgtcacttctggtataccttcaggatttcccttaaccgttatagttaattctttagttaattctttctttgtgcactttgcttatatgaagcttcattcttctgaagtgcacaaggctttgtatcctctttattcttttagaacccttgtatcatatgctgtttatggggatgataatctaatttctgtacatgacacaattaaagatacttttaatttagttactatatctaacttattgttggagcatggtgtgactcttaagaatggagccgataaaaatgaggaaattttatctccattctatcctatagagaaggtggattttctcaagagacgattcaccactttacaaggacatattgttgctccacttaacactgttaatataactgagcgcttgcactgggttcgtaagggcctaggtgatgctgatgccacacttgagaactgtaaatcagctctctttgaagctttatttcatggagagctgtattacaatgatcttcgaggcaaaattgaaaaagcttgtaaagtgaagggccttcctttgatagtcccagattaccaagacgctctttctttatttttaactggaggctcatatgctaaggctattcaggctatagcgatgaatctccctgatagaatctctctgtacaaatctgaattctatagtgtacaaatatatcctcaaattttttatgtgaccaatgagagaaatgtcacacttcagaaattgctggagaccactactctccgtaacatttgttatgtttctaggaactacgagtctaggagcagttctaggggtcttttcactcttaagggtgaaggttggactccagctgctttgaaagctcgtcttagtgtgtacaaagctatggccaaacctgtttacttcgtagatgaggctaatgatggtttggctatgttttattgcttagattatgcttttcgtgtttgtggtttaacccggagtcaaattgcaaaaattcttaatgcagtttttggtggtaaccccgaagtctgccaaagaattttccaatttttctctcaagtcgagccaaccaataagtacattcctcccaatcaaaggagg

SEQ ID NO: 473 - protein, 217 aa, Apple latent spherical virus
GPDFTKIIWPTVVERNFSNPQSEITTTLQELYGDTFETVSICPPQSYGGELLKGKIFFSSTPEFTREDLVEGKILASFKLDEVLSGLGMGAMLMTQIMSGHATIRVSAKVMLSKFCSFALKLVYDELMQLNSDTTDFGKISVLPGAIFSTQEEEFSFDFELFSPGVHLKFDNNKLLGKVHLAALSAPNLTENMPESFSCTFNFSIVDVKTTFYNIGQ

SEQ ID NO: 474 - DNA, 651 bp, Apple latent spherical virus
  source 1..651: mol_type = other DNA
ggccctgatttcacaaagattatctggcccacggtcgtggaacgaaacttttctaatccacagagtgaaatcacgaccaccttgcaagagttatatggagacacttttgagactgtttccatttgccctccccaatcttatgggggagaactcttgaaagggaaaattttcttttcttctactccagaatttaccagggaggaccttgttgaagggaaaatccttgcttcctttaagcttgatgaggttttatcaggcttgggaatgggagctatgctgatgacgcagatcatgagtggtcatgctaccattcgagtatctgctaaagttatgctcagtaagttttgtagttttgctttaaaacttgtgtatgatgaactcatgcaattgaattctgacaccactgatttcggtaagatcagtgttcttcctggagcaatttttagcacacaagaagaagagttttcttttgattttgaattgttttcacctggtgttcatcttaagtttgataacaacaagcttttggggaaagttcacctggcagctctcagtgctcccaatttgacagagaatatgcctgagagtttttcttgtacatttaatttctctattgtagatgtaaaaactacattctataatataggacag

SEQ ID NO: 475 - protein, 176 aa, Apple latent spherical virus
GACLSIPNFPVHITGKTQQLHVGPKPSIARFSFNPFDLGTVFNRFQSLCAHLEGYSGDLIVNWLVTCSALTNARLYIIPVYDNYSFEKFSEEKLIQCKYEFKQISLVRKGTVHIPFVNWFGSYSRTRFPKLLFYFPNGVSGPSGEKIHVTVQLDRILNFSGLGHRLFKEIGPLVGE

SEQ ID NO: 476 - DNA, 528 bp, Apple latent spherical virus
  source 1..528: mol_type = other DNA
ggtgcttgtttgagtatacccaattttcctgtacatataacgggcaaaactcaacagttacatgtggggccaaaaccttctatagcccggttctcttttaatccttttgatttaggaaccgtgtttaataggtttcagtccttgtgtgctcatcttgagggctactcaggtgatttaattgtaaattggctcgtcacctgttcagctctaactaacgcaagattgtatataatacctgtgtacgataattactcttttgagaagttttctgaggagaaactgattcaatgtaaatatgaatttaaacaaatcagtttagtgcgtaaaggaactgtgcatattccttttgtgaattggtttggttcctattctcgcactcgctttcctaagcttctcttttattttcctaacggtgtatctggaccttcaggggaaaaaatacacgttactgtgcagttagatagaattttaaacttttcaggcttgggacaccgtctattcaaggaaattggtcctttagtaggcgag

SEQ ID NO: 477 - protein, 192 aa, Apple latent spherical virus
GSDPFSFLLNYSHCGTLVESSLNKGGMWCVPVSPVNLAAYTLQGEALVFNDAFVSKTHNWLHFMASTTAYWRGTLHYQMRVTYKDRNAACRNLVAFYTTNNESLFGFNNKPVGDTGISSVMGDSFSVDITVPFLIPTCYLQTIRGKFDYLNSCNGCIYFHLPTKSATSVQLWVRPGQDFDFARFRLLKAGYT

SEQ ID NO: 478 - DNA, 576 bp, Apple latent spherical virus
  source 1..576: mol_type = other DNA
ggttctgaccctttttcttttcttctcaattatagtcattgtggaactctcgttgagagttctctaaataagggaggcatgtggtgtgtacctgtttcccctgtaaatcttgccgcttacacactccaaggagaggcgctagtctttaatgatgcttttgtgtctaaaacgcacaactggcttcattttatggctagtacaacagcctattggcgtggtaccttgcattatcaaatgcgagttacttacaaagataggaatgcagcctgtcgcaaccttgtggctttttatactactaataatgaatctctttttggtttcaataacaagccagttggcgacactggcatatcttctgttatgggagattccttctctgtagatattacagttccttttcttattcccacgtgctatttgcaaacaatacgtgggaagtttgattacctaaatagttgcaatggttgtatttatttccatttaccaactaagagtgccacttcagtgcaactctgggtcaggccaggtcaggattttgactttgccaggttcagattgctcaaagctggttacacc

SEQ ID NO: 479 - DNA, 2858 bp, synthetic construct
  source 1..2858: mol_type = other DNA
tccgttttagagcttgtgagttgttattacgttttgttgtttgaatctctgttttgttactctgatttccttcacgtttgcaccttacactctctaccgataaacattatcatcttttattttgaattttatttgaaaaatttttatattttcaatgtcaatcactactcctgtagtgattcgctttgggagttttgactcccctgctgcggcacagattgccgatactaaggaggaggaaactcctctctctcgccttgcagctttaaatcgcaaggctcaaattgctgctcgttcaagagtagcagctgctgcggcacagtatgccgaagagcaggagacactagttctcactgctcaatccatgagggatgctctccctttgtatttttacaacaattaccaacaacaacaaacaacaaacaacattacaattactatttacaattacacacaaacacgtttttattccggctgtgtagtctttcaacgttgtcttccgatgcccgtgtttccaaacttcagccaagaaatcgtctaagcctaaccttttccaaatctcatactcgactgcacaatgaaattcgttctgtgatttgtcatacttggaaatgtctagctctaatatgtccataggaacattagagtccagatctgagaaaaattcttcgatctgtgtaggcgttttccttgtataaaacatgaatcttgaactgtcaattgtctctagcagctgtcttgttaattctgaaaatacaggaccaaaaagcgcattgattttcttgctatgatacacaatagtttgcaaagccgggtattcagtttgaatactaagatccaaacgctgtttcggctgctgcttgatcatgtgcctgtattgatcaacggctggtaaatcaataaagtcaaaatcagccaactggccaattgttgacttctcttgcttttcgatccatctttccaaactcgcccttgaaagcagaggtatattttttggttttttcttttctttaattaagtatgcatcaaaaaacttatctactactagagaagcggtgtcttcgatgtcaacaacccctactaattcgggagagttgaaatttcttttgatcatcgcgaccaaattttccaacaatccaggttttcgaggtttttcagcagcagtcctgatcacaggtttcaatgtcgtctcagattctctcggaagaggcaccgatttcgacatatccaacacacaatccttgacattcaaactattctctcgtatttgcatagttacagcatcatactcattgagtatagtactgtttcccggcaaacacttgtcgtaataatattgcatgtcagaaacatctcctgtttttggtgctgcgacgaaaaggttaacacctttgtacaccgattctatctgtaattgctattgagtcgacggtagtcaagatgcataataaataacggattgtgtccgtaatcacacgtggtgcgtacgataacgcatagtgtttttccctccacttaaatcgaagggttgtgtcttggatcgcgcgggtcaaatgtatatggttcatatacatccgcaggcacgtaataaagcgaggggttcgaatccccccgttacccccggtaggggcccaagcacaacatttcaaccagaaacactagccgaagcaaatccattccacaagcacctggtgggatcatctcatcatcagaaaccaagagagagattccgtgtccgcttgttgtagtagattgtgaggactgaggaccgagaagcagccatggctctagttgttaaaggaaaagtgaatatcaatgagtttatcgacctgacaaaaatggagaagatcttaccgtcgatgtttacccctgtaaagagtgttatgtgttccaaagttgataaaataatggttcatgagaatgagtcattgtcagaggtgaaccttcttaaaggagttaagcttattgatagtggatacgtctgtttagccggtttggtcgtcacgggcgagtggaacttgcctgacaattgcagaggaggtgtgagcgtgtgtctggtggacaaaaggatggaaagagccgacgaggccactctcggatcttactacacagcagctgcaaagaaaagatttcagttcaaggtcgttcccaattatgctataaccacccaggacgcgatgaaaaacgtctggcaagttttagttaatattagaaatgtgaagatgtcagcgggtttctgtccgctttctctggagtttgtgtcggtgtgtattgtttatagaaataatataaaattaggtttgagagagaagattacaaacgtgagagacggagggcccatggaacttacagaagaagtcgttgatgagttcatggaagatgtccctatgtcgatcaggcttgcaaagtttcgatctcgaaccggaaaaaagagtgatgtccgcaaagggaaaaatagtagtaatgatcggtcagtgccgaacaagaactatagaaatgttaaggattttggaggaatgagttttaaaaagaataatttaatcgatgatgattcggaggctactgtcgccgaatcggattcgttttaaagacgcatccatggctgaatggttaaagcgcccaactcataattggcgaattcgtaggttcaattcctactggatgcaaagatttgtttggtctttcttccttcttttctttctttctttcttttgaactagtttgttctcgtgatccttggatccgttaaggtttcttgctggttcttccttaagatgagaacatgaaccagtctagttctttttgtttgctgtttattttatttcagtgtgtttgaaaagagtcggatagtccaatcc

SEQ ID NO: 480 - DNA, 2784 bp, synthetic construct
  source 1..2784: mol_type = other DNA
tcgttttagagtttatgagaactgtgcgttgtttgtttcaagttccttttgttctgtttcttgccatcatctcaccttttctcatatcctctaccgataaacacccaatcctttcttctttaaacaatctttgtattgttttcttattttttatattttcttatcttgatactcatctctcgggtatcctctttgaccttcgcaagaaggccatctttgatcgcttggatcgttaccaagccatccctcttcctcctccattgccaatcttggcaatttctgttttccctctttcctccccttcttctcaagtatttttacaacaattaccaacaacaacaaacaacaaacaacattacaattactatttacaattacacacaaacacgtttttattccggctgtgtagtctttcaacgttgtcttccgatgcccgtgtttccaaacttcagccaagaaatcgtctaagcctaaccttttccaaatctcatactcgactgcacaatgaaattcgttctgtgatttgtcatacttggaaatgtctagctctaatatgtccataggaacattagagtccagatctgagaaaaattcttcgatctgtgtaggcgttttccttgtataaaacatgaatcttgaactgtcaattgtctctagcagctgtcttgttaattctgaaaatacaggaccaaaaagcgcattgattttcttgctatgatacacaatagtttgcaaagccgggtattcagtttgaatactaagatccaaacgctgtttcggctgctgcttgatcatgtgcctgtattgatcaacggctggtaaatcaataaagtcaaaatcagccaactggccaattgttgacttctcttgcttttcgatccatctttccaaactcgcccttgaaagcagaggtatattttttggttttttcttttctttaattaagtatgcatcaaaaaacttatctactactagagaagcggtgtcttcgatgtcaacaacccctactaattcgggagagttgaaatttcttttgatcatcgcgaccaaattttccaacaatccaggttttcgaggtttttcagcagcagtcctgatcacaggtttcaatgtcgtctcagattctctcggaagaggcaccgatttcgacatatccaacacacaatccttgacattcaaactattctctcgtatttgcatagttacagcatcatactcattgagtatagtactgtttcccggcaaacacttgtcgtaataatattgcatgtcagaaacatctcctgtttttggtgctgcgacgaaaaggttaacacctttgtacaccgattctatctgtaattgctattgagtcgacggtagtcaagatgcataataaataacggattgtgtccgtaatcacacgtggtgcgtacgataacgcatagtgtttttccctccacttaaatcgaagggttgtgtcttggatcgcgcgggtcaaatgtatatggttcatatacatccgcaggcacgtaataaagcgaggggttcgaatccccccgttacccccggtaggggcccaagcacaacatttcaaccagaaacactagccgaagcaaatccattccacaagcacctggtgggatcatctcatcatcagaaaccaagagagagattccgtgtccgcttgttgtagtagattgtgaggactgaggaccgagaagcagccatggctctagttgttaaaggaaaagtgaatatcaatgagtttatcgacctgacaaaaatggagaagatcttaccgtcgatgtttacccctgtaaagagtgttatgtgttccaaagttgataaaataatggttcatgagaatgagtcattgtcagaggtgaaccttcttaaaggagttaagcttattgatagtggatacgtctgtttagccggtttggtcgtcacgggcgagtggaacttgcctgacaattgcagaggaggtgtgagcgtgtgtctggtggacaaaaggatggaaagagccgacgaggccactctcggatcttactacacagcagctgcaaagaaaagatttcagttcaaggtcgttcccaattatgctataaccacccaggacgcgatgaaaaacgtctggcaagttttagttaatattagaaatgtgaagatgtcagcgggtttctgtccgctttctctggagtttgtgtcggtgtgtattgtttatagaaataatataaaattaggtttgagagagaagattacaaacgtgagagacggagggcccatggaacttacagaagaagtcgttgatgagttcatggaagatgtccctatgtcgatcaggcttgcaaagtttcgatctcgaaccggaaaaaagagtgatgtccgcaaagggaaaaatagtagtaatgatcggtcagtgccgaacaagaactatagaaatgttaaggattttggaggaatgagttttaaaaagaataatttaatcgatgatgattcggaggctactgtcgccgaatcggattcgttttaaagacgcatccatggctgaatggttaaagcgcccaactcataattggcgaattcgtaggttcaattcctactggatgcaaagatttggtctttctgctatctttgagtccttttctttttctctttcttttgaactagtttgatctcgtgacctctggtccgttaggtttcttgctggctcttcctaagatgagatcttgaaccagcctagttcttttgttgcttttgcttttgctttagtgtgctcaaaaatgtcggatagtccaatcc

SEQ ID NO: 481 - DNA, 5511 bp, synthetic construct
  source 1..5511: mol_type = other DNA
tccgttttagagcttgtgagttgttattacgttttgttgtttgaatctctgttttgttactctgatttccttcacgtttgcaccttacactctctaccgataaacattatcatcttttattttgaattttatttgaaaaatttttatattttcaatgtcaatcactactcctgtagtgattcgctttgggagttttgactcccctgctgcggcacagattgccgatactaaggaggaggaaactcctctctctcgccttgcagctttaaatcgcaaggctcaaattgctgctcgttcaagagtagcagctgctgcggcacagtatgccgaagagcaggagacactagttctcactgctcaatccatgagggatgctctccctttgtatttttacaacaattaccaacaacaacaaacaacaaacaacattacaattactatttacaattacaaagctgactatgtgatcttattaaaattaggttaaatttcgaggttaaaaatagttttaatattgctatagtcttagaggtcttgtatatttatacttaccacacaagatggaccggagcagccctccaatatctagtgtaccctcgtgctcgctcaaacattaagtggtgttgtgcgaaaagaatctcacttcaaatggcatcttcttcttcttcttctagatggagctatgatgttttcttaagttttagaggcgaagatactcgaaaaacgtttacaagtcacttatacgaagtcttgaatgataagggaataaaaacctttcaagatgataaaaggctagagtacggcgcaaccatcccaggtgaactctgtaaagctatagaagagtctcaatttgccattgttgttttctcagagaattatgcaacatcaaggtggtgtttgaatgaactagtgaagatcatggaatgcaaaactcgatttaagcaaactgttataccgatattctatgatgtggatccatcacatgttcggaaccaaaaggagagctttgcaaaagcctttgaagaacatgaaacaaagtataaggatgatgttgagggaatacaaagatggaggattgctttaaatgaagcggccaatctcaaaggctcctgtgataatcgtgacaagactgatgcagactgtattcgacagattgttgaccaaatctcatccaaattatgcaagatttctttatcttatttgcaaaacattgttggaatagatactcatttagagaaaatagaatccttactagagataggaatcaatggtgttcggattatggggatctggggaatggggggagtcggtaaaacaacaatagcaagagctatatttgatactcttttaggaagaatggatagttcctatcaatttgatggtgcttgtttccttaaggatattaaagaaaacaaacgtggaatgcattctttgcaaaatgcccttctctctgaacttttaagggaaaaagctaattacaataatgaggaggatggaaagcaccaaatggctagtagacttcgttcgaagaaggtcctaattgtgcttgatgatatagataataaagatcattatttggagtatttagcaggtgatcttgattggtttggtaatggtagtagaattattataacaactagagacaagcatttgatagagaagaatgatataatatatgaggtgactgcactacccgatcatgaatccattcaattgttcaaacaacatgctttcggaaaagaagttccaaatgagaattttgagaagctttcattagaggtagtaaattatgctaaaggccttcctttagccctcaaagtgtggggttctttgctgcataacctacgattaactgaatggaaaagtgctatagagcacatgaaaaataactcttattctggaattattgataagctcaaaataagttatgatggattagagcccaaacaacaagagatgtttttagatatagcatgcttcttgcgaggggaagaaaaagattacatcctacaaatccttgagagttgtcatattggagctgaatacgggttacgtattttaattgacaaatctcttgtgttcatctctgaatataatcaggttcaaatgcatgacttaatacaggatatgggtaaatatatagtgaattttcaaaaagatcccggagaacgtagcagattatggctcgccaaggaagtcgaagaagtgatgagcaacaacacagggaccatggcaatggaagcaatttgggtttcttcttattctagtactctacgctttagcaatcaggccgtgaaaaatatgaaaaggcttagggtatttaacatggggaggtcgtcgacacattatgccatcgattatctgcccaacaacttgcgttgttttgtttgcactaactatccttgggagtcatttccatctacatttgaactcaaaatgcttgttcacctccaactccgacacaattctctgcgtcatttatggacagaaacaaagcatttgccgtctctacggaggatagatctcagctggtctaaaagattgacgcgaacaccagatttcacggggatgccaaatttggagtatgtgaatttgtatcaatgtagtaatcttgaagaagttcaccattccctgggatgttgcagcaaagtcattggtttatatttgaatgattgtaaaagccttaagaggtttccatgtgttaacgtggaatctcttgaatatctgggtctaagaagttgcgatagtttagagaaattgccagaaatctacgggagaatgaagccggagatacagattcacatgcaaggctctgggataagggaactaccatcatctatttttcagtacaaaactcatgttaccaagctattgttgtggaatatgaaaaaccttgtagctcttccaagcagcatatgtaggttgaaaagtttggttagtctgagtgtgtcgggttgctcaaaacttgaaagcttgccagaagagataggggatttagacaacttacgggtgtttgatgccagtgatactctaattttacgacctccgtcttccatcatacgcttgaacaaacttataatcttgatgtttcgaggcttcaaagatggagtgcactttgagttccctcctgtggctgaaggattacactcattggaatatctgaatctcagttactgcaatctaatagatggaggacttccggaagagattggatccttatcctctttgaaaaagttggatctcagtagaaataattttgagcatttgccttcaagtatagcccaacttggtgctcttcaatccttagacttaaaagattgccagaggcttacacagctaccagaacttcccccagaattaaatgaattgcatgtagattgtcatatggctctgaaatttatccattatttagtaacaaagagaaagaaactacatagagtgaaacttgatgatgcacacaatgatactatgtacaatttgtttgcatataccatgtttcagaatatctcttccatgaggcatgacatctctgcttcagattccttgtcactaacagtatttaccggtcaaccgtatcctgaaaagatcccgagttggttccaccatcagggttgggatagtagtgtatcagtcaatttgcctgaaaattggtatatacctgataaattcttgggatttgctgtatgttactctcgtagcttaattgacacaacagctcacttgattcccgtatgtgatgacaagatgtcgcgcatgacccagaaacttgccttatcagaatgtgatacagaatcatccaactattcagaatgggatatacattttttctttgtaccttttgctggcttatgggatacatctaaggcaaatggaaaaacaccaaatgattatgggattattaggctatctttttctggagaagagaagatgtatggacttcgtttgttgtataaagaaggaccagaggttaatgccttgttacaaatgagggaaaatagcaatgaaccaacagaacattccactgggataaggaggactcaatataacaacagaacttccttttatgagctcatcaatgggtgaggtagtcaagatgcataataaataacggattgtgtccgtaatcacacgtggtgcgtacgataacgcatagtgtttttccctccacttaaatcgaagggttgtgtcttggatcgcgcgggtcaaatgtatatggttcatatacatccgcaggcacgtaataaagcgaggggttcgaatccccccgttacccccggtaggggcccaagcacaacatttcaaccagaaacactagccgaagcaaatccattccacaagcacctggtgggatcatctcatcatcagaaaccaagagagagattccgtgtccgcttgttgtagtagattgtgaggactgaggaccgagaagcagccatggctctagttgttaaaggaaaagtgaatatcaatgagtttatcgacctgacaaaaatggagaagatcttaccgtcgatgtttacccctgtaaagagtgttatgtgttccaaagttgataaaataatggttcatgagaatgagtcattgtcagaggtgaaccttcttaaaggagttaagcttattgatagtggatacgtctgtttagccggtttggtcgtcacgggcgagtggaacttgcctgacaattgcagaggaggtgtgagcgtgtgtctggtggacaaaaggatggaaagagccgacgaggccactctcggatcttactacacagcagctgcaaagaaaagatttcagttcaaggtcgttcccaattatgctataaccacccaggacgcgatgaaaaacgtctggcaagttttagttaatattagaaatgtgaagatgtcagcgggtttctgtccgctttctctggagtttgtgtcggtgtgtattgtttatagaaataatataaaattaggtttgagagagaagattacaaacgtgagagacggagggcccatggaacttacagaagaagtcgttgatgagttcatggaagatgtccctatgtcgatcaggcttgcaaagtttcgatctcgaaccggaaaaaagagtgatgtccgcaaagggaaaaatagtagtaatgatcggtcagtgccgaacaagaactatagaaatgttaaggattttggaggaatgagttttaaaaagaataatttaatcgatgatgattcggaggctactgtcgccgaatcggattcgttttaaagacgcatccatggctgaatggttaaagcgcccaactcataattggcgaattcgtaggttcaattcctactggatgcaaagatttgtttggtctttcttccttcttttctttctttctttcttttgaactagtttgttctcgtgatccttggatccgttaaggtttcttgctggttcttccttaagatgagaacatgaaccagtctagttctttttgtttgctgtttattttatttcagtgtgtttgaaaagagtcggatagtccaatcc

SEQ ID NO: 482 - DNA, 5437 bp, synthetic construct
  source 1..5437: mol_type = other DNA
tcgttttagagtttatgagaactgtgcgttgtttgtttcaagttccttttgttctgtttcttgccatcatctcaccttttctcatatcctctaccgataaacacccaatcctttcttctttaaacaatctttgtattgttttcttattttttatattttcttatcttgatactcatctctcgggtatcctctttgaccttcgcaagaaggccatctttgatcgcttggatcgttaccaagccatccctcttcctcctccattgccaatcttggcaatttctgttttccctctttcctccccttcttctcaagtatttttacaacaattaccaacaacaacaaacaacaaacaacattacaattactatttacaattacaaagctgactatgtgatcttattaaaattaggttaaatttcgaggttaaaaatagttttaatattgctatagtcttagaggtcttgtatatttatacttaccacacaagatggaccggagcagccctccaatatctagtgtaccctcgtgctcgctcaaacattaagtggtgttgtgcgaaaagaatctcacttcaaatggcatcttcttcttcttcttctagatggagctatgatgttttcttaagttttagaggcgaagatactcgaaaaacgtttacaagtcacttatacgaagtcttgaatgataagggaataaaaacctttcaagatgataaaaggctagagtacggcgcaaccatcccaggtgaactctgtaaagctatagaagagtctcaatttgccattgttgttttctcagagaattatgcaacatcaaggtggtgtttgaatgaactagtgaagatcatggaatgcaaaactcgatttaagcaaactgttataccgatattctatgatgtggatccatcacatgttcggaaccaaaaggagagctttgcaaaagcctttgaagaacatgaaacaaagtataaggatgatgttgagggaatacaaagatggaggattgctttaaatgaagcggccaatctcaaaggctcctgtgataatcgtgacaagactgatgcagactgtattcgacagattgttgaccaaatctcatccaaattatgcaagatttctttatcttatttgcaaaacattgttggaatagatactcatttagagaaaatagaatccttactagagataggaatcaatggtgttcggattatggggatctggggaatggggggagtcggtaaaacaacaatagcaagagctatatttgatactcttttaggaagaatggatagttcctatcaatttgatggtgcttgtttccttaaggatattaaagaaaacaaacgtggaatgcattctttgcaaaatgcccttctctctgaacttttaagggaaaaagctaattacaataatgaggaggatggaaagcaccaaatggctagtagacttcgttcgaagaaggtcctaattgtgcttgatgatatagataataaagatcattatttggagtatttagcaggtgatcttgattggtttggtaatggtagtagaattattataacaactagagacaagcatttgatagagaagaatgatataatatatgaggtgactgcactacccgatcatgaatccattcaattgttcaaacaacatgctttcggaaaagaagttccaaatgagaattttgagaagctttcattagaggtagtaaattatgctaaaggccttcctttagccctcaaagtgtggggttctttgctgcataacctacgattaactgaatggaaaagtgctatagagcacatgaaaaataactcttattctggaattattgataagctcaaaataagttatgatggattagagcccaaacaacaagagatgtttttagatatagcatgcttcttgcgaggggaagaaaaagattacatcctacaaatccttgagagttgtcatattggagctgaatacgggttacgtattttaattgacaaatctcttgtgttcatctctgaatataatcaggttcaaatgcatgacttaatacaggatatgggtaaatatatagtgaattttcaaaaagatcccggagaacgtagcagattatggctcgccaaggaagtcgaagaagtgatgagcaacaacacagggaccatggcaatggaagcaatttgggtttcttcttattctagtactctacgctttagcaatcaggccgtgaaaaatatgaaaaggcttagggtatttaacatggggaggtcgtcgacacattatgccatcgattatctgcccaacaacttgcgttgttttgtttgcactaactatccttgggagtcatttccatctacatttgaactcaaaatgcttgttcacctccaactccgacacaattctctgcgtcatttatggacagaaacaaagcatttgccgtctctacggaggatagatctcagctggtctaaaagattgacgcgaacaccagatttcacggggatgccaaatttggagtatgtgaatttgtatcaatgtagtaatcttgaagaagttcaccattccctgggatgttgcagcaaagtcattggtttatatttgaatgattgtaaaagccttaagaggtttccatgtgttaacgtggaatctcttgaatatctgggtctaagaagttgcgatagtttagagaaattgccagaaatctacgggagaatgaagccggagatacagattcacatgcaaggctctgggataagggaactaccatcatctatttttcagtacaaaactcatgttaccaagctattgttgtggaatatgaaaaaccttgtagctcttccaagcagcatatgtaggttgaaaagtttggttagtctgagtgtgtcgggttgctcaaaacttgaaagcttgccagaagagataggggatttagacaacttacgggtgtttgatgccagtgatactctaattttacgacctccgtcttccatcatacgcttgaacaaacttataatcttgatgtttcgaggcttcaaagatggagtgcactttgagttccctcctgtggctgaaggattacactcattggaatatctgaatctcagttactgcaatctaatagatggaggacttccggaagagattggatccttatcctctttgaaaaagttggatctcagtagaaataattttgagcatttgccttcaagtatagcccaacttggtgctcttcaatccttagacttaaaagattgccagaggcttacacagctaccagaacttcccccagaattaaatgaattgcatgtagattgtcatatggctctgaaatttatccattatttagtaacaaagagaaagaaactacatagagtgaaacttgatgatgcacacaatgatactatgtacaatttgtttgcatataccatgtttcagaatatctcttccatgaggcatgacatctctgcttcagattccttgtcactaacagtatttaccggtcaaccgtatcctgaaaagatcccgagttggttccaccatcagggttgggatagtagtgtatcagtcaatttgcctgaaaattggtatatacctgataaattcttgggatttgctgtatgttactctcgtagcttaattgacacaacagctcacttgattcccgtatgtgatgacaagatgtcgcgcatgacccagaaacttgccttatcagaatgtgatacagaatcatccaactattcagaatgggatatacattttttctttgtaccttttgctggcttatgggatacatctaaggcaaatggaaaaacaccaaatgattatgggattattaggctatctttttctggagaagagaagatgtatggacttcgtttgttgtataaagaaggaccagaggttaatgccttgttacaaatgagggaaaatagcaatgaaccaacagaacattccactgggataaggaggactcaatataacaacagaacttccttttatgagctcatcaatgggtgaggtagtcaagatgcataataaataacggattgtgtccgtaatcacacgtggtgcgtacgataacgcatagtgtttttccctccacttaaatcgaagggttgtgtcttggatcgcgcgggtcaaatgtatatggttcatatacatccgcaggcacgtaataaagcgaggggttcgaatccccccgttacccccggtaggggcccaagcacaacatttcaaccagaaacactagccgaagcaaatccattccacaagcacctggtgggatcatctcatcatcagaaaccaagagagagattccgtgtccgcttgttgtagtagattgtgaggactgaggaccgagaagcagccatggctctagttgttaaaggaaaagtgaatatcaatgagtttatcgacctgacaaaaatggagaagatcttaccgtcgatgtttacccctgtaaagagtgttatgtgttccaaagttgataaaataatggttcatgagaatgagtcattgtcagaggtgaaccttcttaaaggagttaagcttattgatagtggatacgtctgtttagccggtttggtcgtcacgggcgagtggaacttgcctgacaattgcagaggaggtgtgagcgtgtgtctggtggacaaaaggatggaaagagccgacgaggccactctcggatcttactacacagcagctgcaaagaaaagatttcagttcaaggtcgttcccaattatgctataaccacccaggacgcgatgaaaaacgtctggcaagttttagttaatattagaaatgtgaagatgtcagcgggtttctgtccgctttctctggagtttgtgtcggtgtgtattgtttatagaaataatataaaattaggtttgagagagaagattacaaacgtgagagacggagggcccatggaacttacagaagaagtcgttgatgagttcatggaagatgtccctatgtcgatcaggcttgcaaagtttcgatctcgaaccggaaaaaagagtgatgtccgcaaagggaaaaatagtagtaatgatcggtcagtgccgaacaagaactatagaaatgttaaggattttggaggaatgagttttaaaaagaataatttaatcgatgatgattcggaggctactgtcgccgaatcggattcgttttaaagacgcatccatggctgaatggttaaagcgcccaactcataattggcgaattcgtaggttcaattcctactggatgcaaagatttggtctttctgctatctttgagtccttttctttttctctttcttttgaactagtttgatctcgtgacctctggtccgttaggtttcttgctggctcttcctaagatgagatcttgaaccagcctagttcttttgttgcttttgcttttgctttagtgtgctcaaaaatgtcggatagtccaatcc

SEQ ID NO: 483 - DNA, 2586 bp, synthetic construct
  source 1..2586: mol_type = other DNA
tccgttttagagcttgtgagttgttattacgttttgttgtttgaatctctgttttgttactctgatttccttcacgtttgcaccttacactctctaccgataaacattatcatcttttattttgaattttatttgaaaaatttttatattttcaatgtcaatcactactcctgtagtgattcgctttgggagttttgactcccctgctgcggcacagattgccgatactaaggaggaggaaactcctctctctcgccttgcagctttaaatcgcaaggctcaaattgctgctcgttcaagagtagcagctgctgcggcacagtatgccgaagagcaggagacactagttctcactgctcaatccatgagggatgctctccctttcacaaacacgtttttattccggctgtgtagtctttcaacgttgtcttccgatgcccgtgtttccaaacttcagccaagaaatcgtctaagcctaaccttttccaaatctcatactcgactgcacaatgaaattcgttctgtgatttgtcatacttggaaatgtctagctctaatatgtccataggaacattagagtccagatctgagaaaaattcttcgatctgtgtaggcgttttccttgtataaaacatgaatcttgaactgtcaattgtctctagcagctgtcttgttaattctgaaaatacaggaccaaaaagcgcattgattttcttgctatgatacacaatagtttgcaaagccgggtattcagtttgaatactaagatccaaacgctgtttcggctgctgcttgatcatgtgcctgtattgatcaacggctggtaaatcaataaagtcaaaatcagccaactggccaattgttgacttctcttgcttttcgatccatctttccaaactcgcccttgaaagcagaggtatattttttggttttttcttttctttaattaagtatgcatcaaaaaacttatctactactagagaagcggtgtcttcgatgtcaacaacccctactaattcgggagagttgaaatttcttttgatcatcgcgaccaaattttccaacaatccaggttttcgaggtttttcagcagcagtcctgatcacaggtttcaatgtcgtctcagattctctcggaagaggcaccgatttcgacatatccaacacacaatccttgacattcaaactattctctcgtatttgcatagttacagcatcatactcattgagtatagtactgtttcccggcaaacacttgtcgtaataatattgcatgtcagaaacatctcctgtttttggtgctgcgacgaaaaggttaacacctttgtacaccgattctatctgtaattgctattgagtcgacagcacaacatttcaaccagaaacactagccgaagcaaatccattccacaagcacctggtgggatcatctcatcatcagaaaccaagagagagattccgtgtccgcttgttgtagtagattgtgaggactgaggaccgagaagcagccatggctctagttgttaaaggaaaagtgaatatcaatgagtttatcgacctgacaaaaatggagaagatcttaccgtcgatgtttacccctgtaaagagtgttatgtgttccaaagttgataaaataatggttcatgagaatgagtcattgtcagaggtgaaccttcttaaaggagttaagcttattgatagtggatacgtctgtttagccggtttggtcgtcacgggcgagtggaacttgcctgacaattgcagaggaggtgtgagcgtgtgtctggtggacaaaaggatggaaagagccgacgaggccactctcggatcttactacacagcagctgcaaagaaaagatttcagttcaaggtcgttcccaattatgctataaccacccaggacgcgatgaaaaacgtctggcaagttttagttaatattagaaatgtgaagatgtcagcgggtttctgtccgctttctctggagtttgtgtcggtgtgtattgtttatagaaataatataaaattaggtttgagagagaagattacaaacgtgagagacggagggcccatggaacttacagaagaagtcgttgatgagttcatggaagatgtccctatgtcgatcaggcttgcaaagtttcgatctcgaaccggaaaaaagagtgatgtccgcaaagggaaaaatagtagtaatgatcggtcagtgccgaacaagaactatagaaatgttaaggattttggaggaatgagttttaaaaagaataatttaatcgatgatgattcggaggctactgtcgccgaatcggattcgttttaaagacgcatccatggctgaatggttaaagcgcccaactcataattggcgaattcgtaggttcaattcctactggatgcaaagatttgtttggtctttcttccttcttttctttctttctttcttttgaactagtttgttctcgtgatccttggatccgttaaggtttcttgctggttcttccttaagatgagaacatgaaccagtctagttctttttgtttgctgtttattttatttcagtgtgtttgaaaagagtcggatagtccaatcc

SEQ ID NO: 484 - DNA, 2512 bp, synthetic construct
  source 1..2512: mol_type = other DNA
tcgttttagagtttatgagaactgtgcgttgtttgtttcaagttccttttgttctgtttcttgccatcatctcaccttttctcatatcctctaccgataaacacccaatcctttcttctttaaacaatctttgtattgttttcttattttttatattttcttatcttgatactcatctctcgggtatcctctttgaccttcgcaagaaggccatctttgatcgcttggatcgttaccaagccatccctcttcctcctccattgccaatcttggcaatttctgttttccctctttcctccccttcttctcaacacaaacacgtttttattccggctgtgtagtctttcaacgttgtcttccgatgcccgtgtttccaaacttcagccaagaaatcgtctaagcctaaccttttccaaatctcatactcgactgcacaatgaaattcgttctgtgatttgtcatacttggaaatgtctagctctaatatgtccataggaacattagagtccagatctgagaaaaattcttcgatctgtgtaggcgttttccttgtataaaacatgaatcttgaactgtcaattgtctctagcagctgtcttgttaattctgaaaatacaggaccaaaaagcgcattgattttcttgctatgatacacaatagtttgcaaagccgggtattcagtttgaatactaagatccaaacgctgtttcggctgctgcttgatcatgtgcctgtattgatcaacggctggtaaatcaataaagtcaaaatcagccaactggccaattgttgacttctcttgcttttcgatccatctttccaaactcgcccttgaaagcagaggtatattttttggttttttcttttctttaattaagtatgcatcaaaaaacttatctactactagagaagcggtgtcttcgatgtcaacaacccctactaattcgggagagttgaaatttcttttgatcatcgcgaccaaattttccaacaatccaggttttcgaggtttttcagcagcagtcctgatcacaggtttcaatgtcgtctcagattctctcggaagaggcaccgatttcgacatatccaacacacaatccttgacattcaaactattctctcgtatttgcatagttacagcatcatactcattgagtatagtactgtttcccggcaaacacttgtcgtaataatattgcatgtcagaaacatctcctgtttttggtgctgcgacgaaaaggttaacacctttgtacaccgattctatctgtaattgctattgagtcgacagcacaacatttcaaccagaaacactagccgaagcaaatccattccacaagcacctggtgggatcatctcatcatcagaaaccaagagagagattccgtgtccgcttgttgtagtagattgtgaggactgaggaccgagaagcagccatggctctagttgttaaaggaaaagtgaatatcaatgagtttatcgacctgacaaaaatggagaagatcttaccgtcgatgtttacccctgtaaagagtgttatgtgttccaaagttgataaaataatggttcatgagaatgagtcattgtcagaggtgaaccttcttaaaggagttaagcttattgatagtggatacgtctgtttagccggtttggtcgtcacgggcgagtggaacttgcctgacaattgcagaggaggtgtgagcgtgtgtctggtggacaaaaggatggaaagagccgacgaggccactctcggatcttactacacagcagctgcaaagaaaagatttcagttcaaggtcgttcccaattatgctataaccacccaggacgcgatgaaaaacgtctggcaagttttagttaatattagaaatgtgaagatgtcagcgggtttctgtccgctttctctggagtttgtgtcggtgtgtattgtttatagaaataatataaaattaggtttgagagagaagattacaaacgtgagagacggagggcccatggaacttacagaagaagtcgttgatgagttcatggaagatgtccctatgtcgatcaggcttgcaaagtttcgatctcgaaccggaaaaaagagtgatgtccgcaaagggaaaaatagtagtaatgatcggtcagtgccgaacaagaactatagaaatgttaaggattttggaggaatgagttttaaaaagaataatttaatcgatgatgattcggaggctactgtcgccgaatcggattcgttttaaagacgcatccatggctgaatggttaaagcgcccaactcataattggcgaattcgtaggttcaattcctactggatgcaaagatttggtctttctgctatctttgagtccttttctttttctctttcttttgaactagtttgatctcgtgacctctggtccgttaggtttcttgctggctcttcctaagatgagatcttgaaccagcctagttcttttgttgcttttgcttttgctttagtgtgctcaaaaatgtcggatagtccaatcc

SEQ ID NO: 485 - DNA, 5239 bp, synthetic construct
  source 1..5239: mol_type = other DNA
tccgttttagagcttgtgagttgttattacgttttgttgtttgaatctctgttttgttactctgatttccttcacgtttgcaccttacactctctaccgataaacattatcatcttttattttgaattttatttgaaaaatttttatattttcaatgtcaatcactactcctgtagtgattcgctttgggagttttgactcccctgctgcggcacagattgccgatactaaggaggaggaaactcctctctctcgccttgcagctttaaatcgcaaggctcaaattgctgctcgttcaagagtagcagctgctgcggcacagtatgccgaagagcaggagacactagttctcactgctcaatccatgagggatgctctccctttaagctgactatgtgatcttattaaaattaggttaaatttcgaggttaaaaatagttttaatattgctatagtcttagaggtcttgtatatttatacttaccacacaagatggaccggagcagccctccaatatctagtgtaccctcgtgctcgctcaaacattaagtggtgttgtgcgaaaagaatctcacttcaaatggcatcttcttcttcttcttctagatggagctatgatgttttcttaagttttagaggcgaagatactcgaaaaacgtttacaagtcacttatacgaagtcttgaatgataagggaataaaaacctttcaagatgataaaaggctagagtacggcgcaaccatcccaggtgaactctgtaaagctatagaagagtctcaatttgccattgttgttttctcagagaattatgcaacatcaaggtggtgtttgaatgaactagtgaagatcatggaatgcaaaactcgatttaagcaaactgttataccgatattctatgatgtggatccatcacatgttcggaaccaaaaggagagctttgcaaaagcctttgaagaacatgaaacaaagtataaggatgatgttgagggaatacaaagatggaggattgctttaaatgaagcggccaatctcaaaggctcctgtgataatcgtgacaagactgatgcagactgtattcgacagattgttgaccaaatctcatccaaattatgcaagatttctttatcttatttgcaaaacattgttggaatagatactcatttagagaaaatagaatccttactagagataggaatcaatggtgttcggattatggggatctggggaatggggggagtcggtaaaacaacaatagcaagagctatatttgatactcttttaggaagaatggatagttcctatcaatttgatggtgcttgtttccttaaggatattaaagaaaacaaacgtggaatgcattctttgcaaaatgcccttctctctgaacttttaagggaaaaagctaattacaataatgaggaggatggaaagcaccaaatggctagtagacttcgttcgaagaaggtcctaattgtgcttgatgatatagataataaagatcattatttggagtatttagcaggtgatcttgattggtttggtaatggtagtagaattattataacaactagagacaagcatttgatagagaagaatgatataatatatgaggtgactgcactacccgatcatgaatccattcaattgttcaaacaacatgctttcggaaaagaagttccaaatgagaattttgagaagctttcattagaggtagtaaattatgctaaaggccttcctttagccctcaaagtgtggggttctttgctgcataacctacgattaactgaatggaaaagtgctatagagcacatgaaaaataactcttattctggaattattgataagctcaaaataagttatgatggattagagcccaaacaacaagagatgtttttagatatagcatgcttcttgcgaggggaagaaaaagattacatcctacaaatccttgagagttgtcatattggagctgaatacgggttacgtattttaattgacaaatctcttgtgttcatctctgaatataatcaggttcaaatgcatgacttaatacaggatatgggtaaatatatagtgaattttcaaaaagatcccggagaacgtagcagattatggctcgccaaggaagtcgaagaagtgatgagcaacaacacagggaccatggcaatggaagcaatttgggtttcttcttattctagtactctacgctttagcaatcaggccgtgaaaaatatgaaaaggcttagggtatttaacatggggaggtcgtcgacacattatgccatcgattatctgcccaacaacttgcgttgttttgtttgcactaactatccttgggagtcatttccatctacatttgaactcaaaatgcttgttcacctccaactccgacacaattctctgcgtcatttatggacagaaacaaagcatttgccgtctctacggaggatagatctcagctggtctaaaagattgacgcgaacaccagatttcacggggatgccaaatttggagtatgtgaatttgtatcaatgtagtaatcttgaagaagttcaccattccctgggatgttgcagcaaagtcattggtttatatttgaatgattgtaaaagccttaagaggtttccatgtgttaacgtggaatctcttgaatatctgggtctaagaagttgcgatagtttagagaaattgccagaaatctacgggagaatgaagccggagatacagattcacatgcaaggctctgggataagggaactaccatcatctatttttcagtacaaaactcatgttaccaagctattgttgtggaatatgaaaaaccttgtagctcttccaagcagcatatgtaggttgaaaagtttggttagtctgagtgtgtcgggttgctcaaaacttgaaagcttgccagaagagataggggatttagacaacttacgggtgtttgatgccagtgatactctaattttacgacctccgtcttccatcatacgcttgaacaaacttataatcttgatgtttcgaggcttcaaagatggagtgcactttgagttccctcctgtggctgaaggattacactcattggaatatctgaatctcagttactgcaatctaatagatggaggacttccggaagagattggatccttatcctctttgaaaaagttggatctcagtagaaataattttgagcatttgccttcaagtatagcccaacttggtgctcttcaatccttagacttaaaagattgccagaggcttacacagctaccagaacttcccccagaattaaatgaattgcatgtagattgtcatatggctctgaaatttatccattatttagtaacaaagagaaagaaactacatagagtgaaacttgatgatgcacacaatgatactatgtacaatttgtttgcatataccatgtttcagaatatctcttccatgaggcatgacatctctgcttcagattccttgtcactaacagtatttaccggtcaaccgtatcctgaaaagatcccgagttggttccaccatcagggttgggatagtagtgtatcagtcaatttgcctgaaaattggtatatacctgataaattcttgggatttgctgtatgttactctcgtagcttaattgacacaacagctcacttgattcccgtatgtgatgacaagatgtcgcgcatgacccagaaacttgccttatcagaatgtgatacagaatcatccaactattcagaatgggatatacattttttctttgtaccttttgctggcttatgggatacatctaaggcaaatggaaaaacaccaaatgattatgggattattaggctatctttttctggagaagagaagatgtatggacttcgtttgttgtataaagaaggaccagaggttaatgccttgttacaaatgagggaaaatagcaatgaaccaacagaacattccactgggataaggaggactcaatataacaacagaacttccttttatgagctcatcaatgggtgaagcacaacatttcaaccagaaacactagccgaagcaaatccattccacaagcacctggtgggatcatctcatcatcagaaaccaagagagagattccgtgtccgcttgttgtagtagattgtgaggactgaggaccgagaagcagccatggctctagttgttaaaggaaaagtgaatatcaatgagtttatcgacctgacaaaaatggagaagatcttaccgtcgatgtttacccctgtaaagagtgttatgtgttccaaagttgataaaataatggttcatgagaatgagtcattgtcagaggtgaaccttcttaaaggagttaagcttattgatagtggatacgtctgtttagccggtttggtcgtcacgggcgagtggaacttgcctgacaattgcagaggaggtgtgagcgtgtgtctggtggacaaaaggatggaaagagccgacgaggccactctcggatcttactacacagcagctgcaaagaaaagatttcagttcaaggtcgttcccaattatgctataaccacccaggacgcgatgaaaaacgtctggcaagttttagttaatattagaaatgtgaagatgtcagcgggtttctgtccgctttctctggagtttgtgtcggtgtgtattgtttatagaaataatataaaattaggtttgagagagaagattacaaacgtgagagacggagggcccatggaacttacagaagaagtcgttgatgagttcatggaagatgtccctatgtcgatcaggcttgcaaagtttcgatctcgaaccggaaaaaagagtgatgtccgcaaagggaaaaatagtagtaatgatcggtcagtgccgaacaagaactatagaaatgttaaggattttggaggaatgagttttaaaaagaataatttaatcgatgatgattcggaggctactgtcgccgaatcggattcgttttaaagacgcatccatggctgaatggttaaagcgcccaactcataattggcgaattcgtaggttcaattcctactggatgcaaagatttgtttggtctttcttccttcttttctttctttctttcttttgaactagtttgttctcgtgatccttggatccgttaaggtttcttgctggttcttccttaagatgagaacatgaaccagtctagttctttttgtttgctgtttattttatttcagtgtgtttgaaaagagtcggatagtccaatcc

SEQ ID NO: 486 - DNA, 5165 bp, synthetic construct
  source 1..5165: mol_type = other DNA
tcgttttagagtttatgagaactgtgcgttgtttgtttcaagttccttttgttctgtttcttgccatcatctcaccttttctcatatcctctaccgataaacacccaatcctttcttctttaaacaatctttgtattgttttcttattttttatattttcttatcttgatactcatctctcgggtatcctctttgaccttcgcaagaaggccatctttgatcgcttggatcgttaccaagccatccctcttcctcctccattgccaatcttggcaatttctgttttccctctttcctccccttcttctcaaaagctgactatgtgatcttattaaaattaggttaaatttcgaggttaaaaatagttttaatattgctatagtcttagaggtcttgtatatttatacttaccacacaagatggaccggagcagccctccaatatctagtgtaccctcgtgctcgctcaaacattaagtggtgttgtgcgaaaagaatctcacttcaaatggcatcttcttcttcttcttctagatggagctatgatgttttcttaagttttagaggcgaagatactcgaaaaacgtttacaagtcacttatacgaagtcttgaatgataagggaataaaaacctttcaagatgataaaaggctagagtacggcgcaaccatcccaggtgaactctgtaaagctatagaagagtctcaatttgccattgttgttttctcagagaattatgcaacatcaaggtggtgtttgaatgaactagtgaagatcatggaatgcaaaactcgatttaagcaaactgttataccgatattctatgatgtggatccatcacatgttcggaaccaaaaggagagctttgcaaaagcctttgaagaacatgaaacaaagtataaggatgatgttgagggaatacaaagatggaggattgctttaaatgaagcggccaatctcaaaggctcctgtgataatcgtgacaagactgatgcagactgtattcgacagattgttgaccaaatctcatccaaattatgcaagatttctttatcttatttgcaaaacattgttggaatagatactcatttagagaaaatagaatccttactagagataggaatcaatggtgttcggattatggggatctggggaatggggggagtcggtaaaacaacaatagcaagagctatatttgatactcttttaggaagaatggatagttcctatcaatttgatggtgcttgtttccttaaggatattaaagaaaacaaacgtggaatgcattctttgcaaaatgcccttctctctgaacttttaagggaaaaagctaattacaataatgaggaggatggaaagcaccaaatggctagtagacttcgttcgaagaaggtcctaattgtgcttgatgatatagataataaagatcattatttggagtatttagcaggtgatcttgattggtttggtaatggtagtagaattattataacaactagagacaagcatttgatagagaagaatgatataatatatgaggtgactgcactacccgatcatgaatccattcaattgttcaaacaacatgctttcggaaaagaagttccaaatgagaattttgagaagctttcattagaggtagtaaattatgctaaaggccttcctttagccctcaaagtgtggggttctttgctgcataacctacgattaactgaatggaaaagtgctatagagcacatgaaaaataactcttattctggaattattgataagctcaaaataagttatgatggattagagcccaaacaacaagagatgtttttagatatagcatgcttcttgcgaggggaagaaaaagattacatcctacaaatccttgagagttgtcatattggagctgaatacgggttacgtattttaattgacaaatctcttgtgttcatctctgaatataatcaggttcaaatgcatgacttaatacaggatatgggtaaatatatagtgaattttcaaaaagatcccggagaacgtagcagattatggctcgccaaggaagtcgaagaagtgatgagcaacaacacagggaccatggcaatggaagcaatttgggtttcttcttattctagtactctacgctttagcaatcaggccgtgaaaaatatgaaaaggcttagggtatttaacatggggaggtcgtcgacacattatgccatcgattatctgcccaacaacttgcgttgttttgtttgcactaactatccttgggagtcatttccatctacatttgaactcaaaatgcttgttcacctccaactccgacacaattctctgcgtcatttatggacagaaacaaagcatttgccgtctctacggaggatagatctcagctggtctaaaagattgacgcgaacaccagatttcacggggatgccaaatttggagtatgtgaatttgtatcaatgtagtaatcttgaagaagttcaccattccctgggatgttgcagcaaagtcattggtttatatttgaatgattgtaaaagccttaagaggtttccatgtgttaacgtggaatctcttgaatatctgggtctaagaagttgcgatagtttagagaaattgccagaaatctacgggagaatgaagccggagatacagattcacatgcaaggctctgggataagggaactaccatcatctatttttcagtacaaaactcatgttaccaagctattgttgtggaatatgaaaaaccttgtagctcttccaagcagcatatgtaggttgaaaagtttggttagtctgagtgtgtcgggttgctcaaaacttgaaagcttgccagaagagataggggatttagacaacttacgggtgtttgatgccagtgatactctaattttacgacctccgtcttccatcatacgcttgaacaaacttataatcttgatgtttcgaggcttcaaagatggagtgcactttgagttccctcctgtggctgaaggattacactcattggaatatctgaatctcagttactgcaatctaatagatggaggacttccggaagagattggatccttatcctctttgaaaaagttggatctcagtagaaataattttgagcatttgccttcaagtatagcccaacttggtgctcttcaatccttagacttaaaagattgccagaggcttacacagctaccagaacttcccccagaattaaatgaattgcatgtagattgtcatatggctctgaaatttatccattatttagtaacaaagagaaagaaactacatagagtgaaacttgatgatgcacacaatgatactatgtacaatttgtttgcatataccatgtttcagaatatctcttccatgaggcatgacatctctgcttcagattccttgtcactaacagtatttaccggtcaaccgtatcctgaaaagatcccgagttggttccaccatcagggttgggatagtagtgtatcagtcaatttgcctgaaaattggtatatacctgataaattcttgggatttgctgtatgttactctcgtagcttaattgacacaacagctcacttgattcccgtatgtgatgacaagatgtcgcgcatgacccagaaacttgccttatcagaatgtgatacagaatcatccaactattcagaatgggatatacattttttctttgtaccttttgctggcttatgggatacatctaaggcaaatggaaaaacaccaaatgattatgggattattaggctatctttttctggagaagagaagatgtatggacttcgtttgttgtataaagaaggaccagaggttaatgccttgttacaaatgagggaaaatagcaatgaaccaacagaacattccactgggataaggaggactcaatataacaacagaacttccttttatgagctcatcaatgggtgaagcacaacatttcaaccagaaacactagccgaagcaaatccattccacaagcacctggtgggatcatctcatcatcagaaaccaagagagagattccgtgtccgcttgttgtagtagattgtgaggactgaggaccgagaagcagccatggctctagttgttaaaggaaaagtgaatatcaatgagtttatcgacctgacaaaaatggagaagatcttaccgtcgatgtttacccctgtaaagagtgttatgtgttccaaagttgataaaataatggttcatgagaatgagtcattgtcagaggtgaaccttcttaaaggagttaagcttattgatagtggatacgtctgtttagccggtttggtcgtcacgggcgagtggaacttgcctgacaattgcagaggaggtgtgagcgtgtgtctggtggacaaaaggatggaaagagccgacgaggccactctcggatcttactacacagcagctgcaaagaaaagatttcagttcaaggtcgttcccaattatgctataaccacccaggacgcgatgaaaaacgtctggcaagttttagttaatattagaaatgtgaagatgtcagcgggtttctgtccgctttctctggagtttgtgtcggtgtgtattgtttatagaaataatataaaattaggtttgagagagaagattacaaacgtgagagacggagggcccatggaacttacagaagaagtcgttgatgagttcatggaagatgtccctatgtcgatcaggcttgcaaagtttcgatctcgaaccggaaaaaagagtgatgtccgcaaagggaaaaatagtagtaatgatcggtcagtgccgaacaagaactatagaaatgttaaggattttggaggaatgagttttaaaaagaataatttaatcgatgatgattcggaggctactgtcgccgaatcggattcgttttaaagacgcatccatggctgaatggttaaagcgcccaactcataattggcgaattcgtaggttcaattcctactggatgcaaagatttggtctttctgctatctttgagtccttttctttttctctttcttttgaactagtttgatctcgtgacctctggtccgttaggtttcttgctggctcttcctaagatgagatcttgaaccagcctagttcttttgttgcttttgcttttgctttagtgtgctcaaaaatgtcggatagtccaatcc

SEQ ID NO: 487 - DNA, 2096 bp, synthetic construct
  source 1..2096: mol_type = other DNA
tccgttttagagcttgtgagttgttattacgttttgttgtttgaatctctgttttgttactctgatttccttcacgtttgcaccttacactctctaccgataaacattatcatcttttattttgaattttatttgaaaaatttttatattttcaatgtcaatcactactcctgtagtgattcgctttgggagttttgactcccctgctgcggcacagattgccgatactaaggaggaggaaactcctctctctcgccttgcagctttaaatcgcaaggctcaaattgctgctcgttcaagagtagcagctgctgcggcacagtatgccgaagagcaggagacactagttctcactgctcaatccatgagggatgctctccctttatggtcggtatgggacaaaaggactcatacgtaggagatgaagcccaaagcaaaagaggtatcctcaccctgaaataccccatcgaacacggtatcatcaccaactgggatgacatggaaaagatctggcaccacaccttctacaacgaactccgtgtcgctccagaagaacacccagtccttctcactgaagctccactcaaccccaaagccaacagggagaagatgacccaaatcatgtttgagaccttcaacacacccgccatgtatgtagccatccaagctgtactctccttgtacgcttctggtcgtaccaccggtatcgtcttggactctggagatggtgtcacccacaccgtaccaatctacgaaggttacgctcttccccacgccatcctccgtttggacttggctggacgtgacttgaccgactacctcatgaaaatcctcaccgagaggggttactcattcaccaccacagctgaaagagcacaacatttcaaccagaaacactagccgaagcaaatccattccacaagcacctggtgggatcatctcatcatcagaaaccaagagagagattccgtgtccgcttgttgtagtagattgtgaggactgaggaccgagaagcagccatggctctagttgttaaaggaaaagtgaatatcaatgagtttatcgacctgacaaaaatggagaagatcttaccgtcgatgtttacccctgtaaagagtgttatgtgttccaaagttgataaaataatggttcatgagaatgagtcattgtcagaggtgaaccttcttaaaggagttaagcttattgatagtggatacgtctgtttagccggtttggtcgtcacgggcgagtggaacttgcctgacaattgcagaggaggtgtgagcgtgtgtctggtggacaaaaggatggaaagagccgacgaggccactctcggatcttactacacagcagctgcaaagaaaagatttcagttcaaggtcgttcccaattatgctataaccacccaggacgcgatgaaaaacgtctggcaagttttagttaatattagaaatgtgaagatgtcagcgggtttctgtccgctttctctggagtttgtgtcggtgtgtattgtttatagaaataatataaaattaggtttgagagagaagattacaaacgtgagagacggagggcccatggaacttacagaagaagtcgttgatgagttcatggaagatgtccctatgtcgatcaggcttgcaaagtttcgatctcgaaccggaaaaaagagtgatgtccgcaaagggaaaaatagtagtaatgatcggtcagtgccgaacaagaactatagaaatgttaaggattttggaggaatgagttttaaaaagaataatttaatcgatgatgattcggaggctactgtcgccgaatcggattcgttttaaagacgcatccatggctgaatggttaaagcgcccaactcataattggcgaattcgtaggttcaattcctactggatgcaaagatttgtttggtctttcttccttcttttctttctttctttcttttgaactagtttgttctcgtgatccttggatccgttaaggtttcttgctggttcttccttaagatgagaacatgaaccagtctagttctttttgtttgctgtttattttatttcagtgtgtttgaaaagagtcggatagtccaatcc

SEQ ID NO: 488 - DNA, 2022 bp, synthetic construct
  source 1..2022: mol_type = other DNA
tcgttttagagtttatgagaactgtgcgttgtttgtttcaagttccttttgttctgtttcttgccatcatctcaccttttctcatatcctctaccgataaacacccaatcctttcttctttaaacaatctttgtattgttttcttattttttatattttcttatcttgatactcatctctcgggtatcctctttgaccttcgcaagaaggccatctttgatcgcttggatcgttaccaagccatccctcttcctcctccattgccaatcttggcaatttctgttttccctctttcctccccttcttctcaaatggtcggtatgggacaaaaggactcatacgtaggagatgaagcccaaagcaaaagaggtatcctcaccctgaaataccccatcgaacacggtatcatcaccaactgggatgacatggaaaagatctggcaccacaccttctacaacgaactccgtgtcgctccagaagaacacccagtccttctcactgaagctccactcaaccccaaagccaacagggagaagatgacccaaatcatgtttgagaccttcaacacacccgccatgtatgtagccatccaagctgtactctccttgtacgcttctggtcgtaccaccggtatcgtcttggactctggagatggtgtcacccacaccgtaccaatctacgaaggttacgctcttccccacgccatcctccgtttggacttggctggacgtgacttgaccgactacctcatgaaaatcctcaccgagaggggttactcattcaccaccacagctgaaagagcacaacatttcaaccagaaacactagccgaagcaaatccattccacaagcacctggtgggatcatctcatcatcagaaaccaagagagagattccgtgtccgcttgttgtagtagattgtgaggactgaggaccgagaagcagccatggctctagttgttaaaggaaaagtgaatatcaatgagtttatcgacctgacaaaaatggagaagatcttaccgtcgatgtttacccctgtaaagagtgttatgtgttccaaagttgataaaataatggttcatgagaatgagtcattgtcagaggtgaaccttcttaaaggagttaagcttattgatagtggatacgtctgtttagccggtttggtcgtcacgggcgagtggaacttgcctgacaattgcagaggaggtgtgagcgtgtgtctggtggacaaaaggatggaaagagccgacgaggccactctcggatcttactacacagcagctgcaaagaaaagatttcagttcaaggtcgttcccaattatgctataaccacccaggacgcgatgaaaaacgtctggcaagttttagttaatattagaaatgtgaagatgtcagcgggtttctgtccgctttctctggagtttgtgtcggtgtgtattgtttatagaaataatataaaattaggtttgagagagaagattacaaacgtgagagacggagggcccatggaacttacagaagaagtcgttgatgagttcatggaagatgtccctatgtcgatcaggcttgcaaagtttcgatctcgaaccggaaaaaagagtgatgtccgcaaagggaaaaatagtagtaatgatcggtcagtgccgaacaagaactatagaaatgttaaggattttggaggaatgagttttaaaaagaataatttaatcgatgatgattcggaggctactgtcgccgaatcggattcgttttaaagacgcatccatggctgaatggttaaagcgcccaactcataattggcgaattcgtaggttcaattcctactggatgcaaagatttggtctttctgctatctttgagtccttttctttttctctttcttttgaactagtttgatctcgtgacctctggtccgttaggtttcttgctggctcttcctaagatgagatcttgaaccagcctagttcttttgttgcttttgcttttgctttagtgtgctcaaaaatgtcggatagtccaatcc

SEQ ID NO: 489 - DNA, 4174 bp, synthetic construct
  source 1..4174: mol_type = other DNA
tccgttttagagcttgtgagttgttattacgttttgttgtttgaatctctgttttgttactctgatttccttcacgtttgcaccttacactctctaccgataaacattatcatcttttattttgaattttatttgaaaaatttttatattttcaatgtcaatcactactcctgtagtgattcgctttgggagttttgactcccctgctgcggcacagattgccgatactaaggaggaggaaactcctctctctcgccttgcagctttaaatcgcaaggctcaaattgctgctcgttcaagagtagcagctgctgcggcacagtatgccgaagagcaggagacactagttctcactgctcaatccatgagggatgctctccctttaagctgactatgtgatcttattaaaattaggttaaatttcgaggttaaaaatagttttaatattgctatagtcttagaggtcttgtatatttatacttaccacacaagatggaccggagcagccctccaatatctagtgtaccctcgtgctcgctcaaacattaagtggtgttgtgcgaaaagaatctcacttcaaatgaacatgaataatactaaattaagcgcaagggccctaccgagtcttattgattattttaatggcatttatggatttgccactggtatcaaagacattatgaatatgatttttaaaacggatacaggtggtaatctaaccttagacgaaatcctaaagaatcagcagttactaaatgagatttctggtaaattggatggggtaaatgggagcttaaatgatcttatcgcacagggaaacttaaatacagaattatctaaggaaatcctaaaaattgcaaatgaacagaatcaagtcttaaatgatgttaataacaaactcgatgcgataaatacgatgcttcatatatatctacctaaaattacatctatgttaagtgatgtaatgaagcaaaattatgcgctaagtctgcaaatagaatacttaagtaagcaattgcaagaaatttctgataaattagatattattaacgtaaatgttcttattaactctacacttactgaaattacacctgcatatcaacggattaaatatgtgaatgaaaaatttgaagaattaacttttgctacagaaaccactttaaaagtaaaaaaggatagctcgcctgctgatattcttgatgagttaactgaattaactgaactagcgaaaagtgttacaaaaaatgacgttgatggttttgaattttaccttaatacattccacgatgtaatggtaggaaataatttactcgggcgttcagctttaaaaactgcttcagaattaattgctaaagaaaatgtgaaaacaagtggcagtgaagtaggaaatgtttataatttcttaattgtattaacagctctacaagcaaaagcttttcttactttaacaacatgccgaaaattattaggcttagcagatattgattatacttctattatgaatgaacatttaaataaggaaaaagaggaatttagagtaaacatccttcctacactttctaatactttttctaatcctaattatgcaaaagttaaaggaagtgatgaagatgcaaagatgattgtggaagctaaaccaggacatgcattggttgggtttgaaatgagcaatgattcaatcacagtattaaaagtatatgaggctaagctaaaacaaaattatcaagttgataaggattccttatcggaggttatttatggtgatatggataaattattgtgtccagatcaatctgaacaaatttattatacaaataatatagtatttccaaatgaatatgtaattactaaaattgattttactaagaaaatgaagactttaagatatgaggtaacagctaattcttatgattcttctacaggagaaattgacttaaataagaagaaagtagaatcaagtgaagcggagtataggacgttaagtgctaaagatgatggagtgtatatgccgttaggtgtcatcagtgaaacatttttgactccgattaatgggtttggcctccaagctgatgaaaattcaagattaattactttaacatgtaaatcatatttaagagaactactgttagcaacagacttaagcaataaagaaactaaattgatcgtcccgccaagtggttttattagtaatattgtagaaaatgggaacttagagggagaaaacttagagccgtggatagcaaataataagaatgcgtatgtagatcatacaggcggagtgaatggtactagagctttatatgttcataaggacggaggattttcacaatctattggagataagttaaaaccgaaaactgagtatgtaatccaatatactgttaaaggaaaaccttctattcatttaaaaaatgaaaatactggatatattcattatgaagatacaaataacaatttagaagattatcaaactattactaaacgttttactacaggaactgatttaaagggagtgtatttaattttaaaaagtcaaaatggagatgaagcctggggagataactttacaattttggaaattagtccttctgaaaagttattaagtccagaattaatcaatgtaaataattggattcgcacgggatcaactcatattagcggttatacactcactctctatcagggaggaggaggaaatctaaaacaaaaccttcaattagacagtttttcaacttatagagtgaatttttctgtgaccggagatgctaatgtaaggattagaaattctagggaagtgttatttgaaaaacgatatatgagcggtgctaaagatgtttctgaaattttcactacaaaattggggaaagataacttttatatagagctttctcaagggaataatttatatggtggtcctcttgtacatttttacgatgtctctattaagtaaagcacaacatttcaaccagaaacactagccgaagcaaatccattccacaagcacctggtgggatcatctcatcatcagaaaccaagagagagattccgtgtccgcttgttgtagtagattgtgaggactgaggaccgagaagcagccatggctctagttgttaaaggaaaagtgaatatcaatgagtttatcgacctgacaaaaatggagaagatcttaccgtcgatgtttacccctgtaaagagtgttatgtgttccaaagttgataaaataatggttcatgagaatgagtcattgtcagaggtgaaccttcttaaaggagttaagcttattgatagtggatacgtctgtttagccggtttggtcgtcacgggcgagtggaacttgcctgacaattgcagaggaggtgtgagcgtgtgtctggtggacaaaaggatggaaagagccgacgaggccactctcggatcttactacacagcagctgcaaagaaaagatttcagttcaaggtcgttcccaattatgctataaccacccaggacgcgatgaaaaacgtctggcaagttttagttaatattagaaatgtgaagatgtcagcgggtttctgtccgctttctctggagtttgtgtcggtgtgtattgtttatagaaataatataaaattaggtttgagagagaagattacaaacgtgagagacggagggcccatggaacttacagaagaagtcgttgatgagttcatggaagatgtccctatgtcgatcaggcttgcaaagtttcgatctcgaaccggaaaaaagagtgatgtccgcaaagggaaaaatagtagtaatgatcggtcagtgccgaacaagaactatagaaatgttaaggattttggaggaatgagttttaaaaagaataatttaatcgatgatgattcggaggctactgtcgccgaatcggattcgttttaaagacgcatccatggctgaatggttaaagcgcccaactcataattggcgaattcgtaggttcaattcctactggatgcaaagatttgtttggtctttcttccttcttttctttctttctttcttttgaactagtttgttctcgtgatccttggatccgttaaggtttcttgctggttcttccttaagatgagaacatgaaccagtctagttctttttgtttgctgtttattttatttcagtgtgtttgaaaagagtcggatagtccaatcc

SEQ ID NO: 490 - DNA, 4100 bp, synthetic construct
  source 1..4100: mol_type = other DNA
tcgttttagagtttatgagaactgtgcgttgtttgtttcaagttccttttgttctgtttcttgccatcatctcaccttttctcatatcctctaccgataaacacccaatcctttcttctttaaacaatctttgtattgttttcttattttttatattttcttatcttgatactcatctctcgggtatcctctttgaccttcgcaagaaggccatctttgatcgcttggatcgttaccaagccatccctcttcctcctccattgccaatcttggcaatttctgttttccctctttcctccccttcttctcaaaagctgactatgtgatcttattaaaattaggttaaatttcgaggttaaaaatagttttaatattgctatagtcttagaggtcttgtatatttatacttaccacacaagatggaccggagcagccctccaatatctagtgtaccctcgtgctcgctcaaacattaagtggtgttgtgcgaaaagaatctcacttcaaatgaacatgaataatactaaattaagcgcaagggccctaccgagtcttattgattattttaatggcatttatggatttgccactggtatcaaagacattatgaatatgatttttaaaacggatacaggtggtaatctaaccttagacgaaatcctaaagaatcagcagttactaaatgagatttctggtaaattggatggggtaaatgggagcttaaatgatcttatcgcacagggaaacttaaatacagaattatctaaggaaatcctaaaaattgcaaatgaacagaatcaagtcttaaatgatgttaataacaaactcgatgcgataaatacgatgcttcatatatatctacctaaaattacatctatgttaagtgatgtaatgaagcaaaattatgcgctaagtctgcaaatagaatacttaagtaagcaattgcaagaaatttctgataaattagatattattaacgtaaatgttcttattaactctacacttactgaaattacacctgcatatcaacggattaaatatgtgaatgaaaaatttgaagaattaacttttgctacagaaaccactttaaaagtaaaaaaggatagctcgcctgctgatattcttgatgagttaactgaattaactgaactagcgaaaagtgttacaaaaaatgacgttgatggttttgaattttaccttaatacattccacgatgtaatggtaggaaataatttactcgggcgttcagctttaaaaactgcttcagaattaattgctaaagaaaatgtgaaaacaagtggcagtgaagtaggaaatgtttataatttcttaattgtattaacagctctacaagcaaaagcttttcttactttaacaacatgccgaaaattattaggcttagcagatattgattatacttctattatgaatgaacatttaaataaggaaaaagaggaatttagagtaaacatccttcctacactttctaatactttttctaatcctaattatgcaaaagttaaaggaagtgatgaagatgcaaagatgattgtggaagctaaaccaggacatgcattggttgggtttgaaatgagcaatgattcaatcacagtattaaaagtatatgaggctaagctaaaacaaaattatcaagttgataaggattccttatcggaggttatttatggtgatatggataaattattgtgtccagatcaatctgaacaaatttattatacaaataatatagtatttccaaatgaatatgtaattactaaaattgattttactaagaaaatgaagactttaagatatgaggtaacagctaattcttatgattcttctacaggagaaattgacttaaataagaagaaagtagaatcaagtgaagcggagtataggacgttaagtgctaaagatgatggagtgtatatgccgttaggtgtcatcagtgaaacatttttgactccgattaatgggtttggcctccaagctgatgaaaattcaagattaattactttaacatgtaaatcatatttaagagaactactgttagcaacagacttaagcaataaagaaactaaattgatcgtcccgccaagtggttttattagtaatattgtagaaaatgggaacttagagggagaaaacttagagccgtggatagcaaataataagaatgcgtatgtagatcatacaggcggagtgaatggtactagagctttatatgttcataaggacggaggattttcacaatctattggagataagttaaaaccgaaaactgagtatgtaatccaatatactgttaaaggaaaaccttctattcatttaaaaaatgaaaatactggatatattcattatgaagatacaaataacaatttagaagattatcaaactattactaaacgttttactacaggaactgatttaaagggagtgtatttaattttaaaaagtcaaaatggagatgaagcctggggagataactttacaattttggaaattagtccttctgaaaagttattaagtccagaattaatcaatgtaaataattggattcgcacgggatcaactcatattagcggttatacactcactctctatcagggaggaggaggaaatctaaaacaaaaccttcaattagacagtttttcaacttatagagtgaatttttctgtgaccggagatgctaatgtaaggattagaaattctagggaagtgttatttgaaaaacgatatatgagcggtgctaaagatgtttctgaaattttcactacaaaattggggaaagataacttttatatagagctttctcaagggaataatttatatggtggtcctcttgtacatttttacgatgtctctattaagtaaagcacaacatttcaaccagaaacactagccgaagcaaatccattccacaagcacctggtgggatcatctcatcatcagaaaccaagagagagattccgtgtccgcttgttgtagtagattgtgaggactgaggaccgagaagcagccatggctctagttgttaaaggaaaagtgaatatcaatgagtttatcgacctgacaaaaatggagaagatcttaccgtcgatgtttacccctgtaaagagtgttatgtgttccaaagttgataaaataatggttcatgagaatgagtcattgtcagaggtgaaccttcttaaaggagttaagcttattgatagtggatacgtctgtttagccggtttggtcgtcacgggcgagtggaacttgcctgacaattgcagaggaggtgtgagcgtgtgtctggtggacaaaaggatggaaagagccgacgaggccactctcggatcttactacacagcagctgcaaagaaaagatttcagttcaaggtcgttcccaattatgctataaccacccaggacgcgatgaaaaacgtctggcaagttttagttaatattagaaatgtgaagatgtcagcgggtttctgtccgctttctctggagtttgtgtcggtgtgtattgtttatagaaataatataaaattaggtttgagagagaagattacaaacgtgagagacggagggcccatggaacttacagaagaagtcgttgatgagttcatggaagatgtccctatgtcgatcaggcttgcaaagtttcgatctcgaaccggaaaaaagagtgatgtccgcaaagggaaaaatagtagtaatgatcggtcagtgccgaacaagaactatagaaatgttaaggattttggaggaatgagttttaaaaagaataatttaatcgatgatgattcggaggctactgtcgccgaatcggattcgttttaaagacgcatccatggctgaatggttaaagcgcccaactcataattggcgaattcgtaggttcaattcctactggatgcaaagatttggtctttctgctatctttgagtccttttctttttctctttcttttgaactagtttgatctcgtgacctctggtccgttaggtttcttgctggctcttcctaagatgagatcttgaaccagcctagttcttttgttgcttttgcttttgctttagtgtgctcaaaaatgtcggatagtccaatcc

SEQ ID NO: 491 - DNA, 1957 bp, synthetic construct
  source 1..1957: mol_type = other DNA
tccgttttagagcttgtgagttgttattacgttttgttgtttgaatctctgttttgttactctgatttccttcacgtttgcaccttacactctctaccgataaacattatcatcttttattttgaattttatttgaaaaatttttatattttcaatgtcaatcactactcctgtagtgattcgctttgggagttttgactcccctgctgcggcacagattgccgatactaaggaggaggaaactcctctctctcgccttgcagctttaaatcgcaaggctcaaattgctgctcgttcaagagtagcagctgctgcggcacagtatgccgaagagcaggagacactagttctcactgctcaatccatgagggatgctctccctttactcttgagtactttcgccagctcacgttgacttttttcgctatcactcctttttagtgtcaaaacgtaggggtcttcgaaaatgttgagactttgcacaatctttctcaggctcgccacagttttcgtcacgatgatatttgactctggggtatagtagataatagatagaagtggtagctttactcgaaggcgaagatctgctcgatgtatttttggcgtgcagcaaatggcatccgatcctagagttctactggcttctgtcccaaatacaaatggcttccgaaagataggattgtcttttagaagcgggagcatttgaagataaagaggagtattgaatttcgggagcacaacatttcaaccagaaacactagccgaagcaaatccattccacaagcacctggtgggatcatctcatcatcagaaaccaagagagagattccgtgtccgcttgttgtagtagattgtgaggactgaggaccgagaagcagccatggctctagttgttaaaggaaaagtgaatatcaatgagtttatcgacctgacaaaaatggagaagatcttaccgtcgatgtttacccctgtaaagagtgttatgtgttccaaagttgataaaataatggttcatgagaatgagtcattgtcagaggtgaaccttcttaaaggagttaagcttattgatagtggatacgtctgtttagccggtttggtcgtcacgggcgagtggaacttgcctgacaattgcagaggaggtgtgagcgtgtgtctggtggacaaaaggatggaaagagccgacgaggccactctcggatcttactacacagcagctgcaaagaaaagatttcagttcaaggtcgttcccaattatgctataaccacccaggacgcgatgaaaaacgtctggcaagttttagttaatattagaaatgtgaagatgtcagcgggtttctgtccgctttctctggagtttgtgtcggtgtgtattgtttatagaaataatataaaattaggtttgagagagaagattacaaacgtgagagacggagggcccatggaacttacagaagaagtcgttgatgagttcatggaagatgtccctatgtcgatcaggcttgcaaagtttcgatctcgaaccggaaaaaagagtgatgtccgcaaagggaaaaatagtagtaatgatcggtcagtgccgaacaagaactatagaaatgttaaggattttggaggaatgagttttaaaaagaataatttaatcgatgatgattcggaggctactgtcgccgaatcggattcgttttaaagacgcatccatggctgaatggttaaagcgcccaactcataattggcgaattcgtaggttcaattcctactggatgcaaagatttgtttggtctttcttccttcttttctttctttctttcttttgaactagtttgttctcgtgatccttggatccgttaaggtttcttgctggttcttccttaagatgagaacatgaaccagtctagttctttttgtttgctgtttattttatttcagtgtgtttgaaaagagtcggatagtccaatcc

SEQ ID NO: 492 - DNA, 1883 bp, synthetic construct
  source 1..1883: mol_type = other DNA
tcgttttagagtttatgagaactgtgcgttgtttgtttcaagttccttttgttctgtttcttgccatcatctcaccttttctcatatcctctaccgataaacacccaatcctttcttctttaaacaatctttgtattgttttcttattttttatattttcttatcttgatactcatctctcgggtatcctctttgaccttcgcaagaaggccatctttgatcgcttggatcgttaccaagccatccctcttcctcctccattgccaatcttggcaatttctgttttccctctttcctccccttcttctcaaactcttgagtactttcgccagctcacgttgacttttttcgctatcactcctttttagtgtcaaaacgtaggggtcttcgaaaatgttgagactttgcacaatctttctcaggctcgccacagttttcgtcacgatgatatttgactctggggtatagtagataatagatagaagtggtagctttactcgaaggcgaagatctgctcgatgtatttttggcgtgcagcaaatggcatccgatcctagagttctactggcttctgtcccaaatacaaatggcttccgaaagataggattgtcttttagaagcgggagcatttgaagataaagaggagtattgaatttcgggagcacaacatttcaaccagaaacactagccgaagcaaatccattccacaagcacctggtgggatcatctcatcatcagaaaccaagagagagattccgtgtccgcttgttgtagtagattgtgaggactgaggaccgagaagcagccatggctctagttgttaaaggaaaagtgaatatcaatgagtttatcgacctgacaaaaatggagaagatcttaccgtcgatgtttacccctgtaaagagtgttatgtgttccaaagttgataaaataatggttcatgagaatgagtcattgtcagaggtgaaccttcttaaaggagttaagcttattgatagtggatacgtctgtttagccggtttggtcgtcacgggcgagtggaacttgcctgacaattgcagaggaggtgtgagcgtgtgtctggtggacaaaaggatggaaagagccgacgaggccactctcggatcttactacacagcagctgcaaagaaaagatttcagttcaaggtcgttcccaattatgctataaccacccaggacgcgatgaaaaacgtctggcaagttttagttaatattagaaatgtgaagatgtcagcgggtttctgtccgctttctctggagtttgtgtcggtgtgtattgtttatagaaataatataaaattaggtttgagagagaagattacaaacgtgagagacggagggcccatggaacttacagaagaagtcgttgatgagttcatggaagatgtccctatgtcgatcaggcttgcaaagtttcgatctcgaaccggaaaaaagagtgatgtccgcaaagggaaaaatagtagtaatgatcggtcagtgccgaacaagaactatagaaatgttaaggattttggaggaatgagttttaaaaagaataatttaatcgatgatgattcggaggctactgtcgccgaatcggattcgttttaaagacgcatccatggctgaatggttaaagcgcccaactcataattggcgaattcgtaggttcaattcctactggatgcaaagatttggtctttctgctatctttgagtccttttctttttctctttcttttgaactagtttgatctcgtgacctctggtccgttaggtttcttgctggctcttcctaagatgagatcttgaaccagcctagttcttttgttgcttttgcttttgctttagtgtgctcaaaaatgtcggatagtccaatcc

SEQ ID NO: 493 - DNA, 2365 bp, synthetic construct
  source 1..2365: mol_type = other DNA
tccgttttagagcttgtgagttgttattacgttttgttgtttgaatctctgttttgttactctgatttccttcacgtttgcaccttacactctctaccgataaacattatcatcttttattttgaattttatttgaaaaatttttatattttcaatgtcaatcactactcctgtagtgattcgctttgggagttttgactcccctgctgcggcacagattgccgatactaaggaggaggaaactcctctctctcgccttgcagctttaaatcgcaaggctcaaattgctgctcgttcaagagtagcagctgctgcggcacagtatgccgaagagcaggagacactagttctcactgctcaatccatgagggatgctctccctttaagctgactatgtgatcttattaaaattaggttaaatttcgaggttaaaaatagttttaatattgctatagtcttagaggtcttgtatatttatacttaccacacaagatggaccggagcagccctccaatatctagtgtaccctcgtgctcgctcaaacattaagtggtgttgtgcgaaaagaatctcacttcaaatgatgaatgctaatggatttagcggtgtggagaaagagtatataaggaaacatcatcttcatcagcctaaggagaatcaatgcagttcgtttttagtcaagcacattcgagcacctgttcatcttgtttggtcattggttaggcggtttgatcagccacaaaagtacaagccctttgttagcaggtgcatcgcgcaaggagatcttgagattggtagtcttagggaagttgatgtcaagtctggcctccctgcaacaacgagtaccgagagattggagcttcttgatgatgaagagcacattttgagtttcagaattattggcggggatcacagacttaggaactactcctcaatcatatctctccaccccgaggtgatcgatggaagacctgggaccttagtaattgaatcatttgtggtggacgtgccccaaggaaacaccaaagacgagacgtgttattttgttgaagcattgatcaattgcaacctaaaatcacttgctgatgtctcagagaggcttgctgtgcaggacaggacagaacccattgatcaggtctaaagcacaacatttcaaccagaaacactagccgaagcaaatccattccacaagcacctggtgggatcatctcatcatcagaaaccaagagagagattccgtgtccgcttgttgtagtagattgtgaggactgaggaccgagaagcagccatggctctagttgttaaaggaaaagtgaatatcaatgagtttatcgacctgacaaaaatggagaagatcttaccgtcgatgtttacccctgtaaagagtgttatgtgttccaaagttgataaaataatggttcatgagaatgagtcattgtcagaggtgaaccttcttaaaggagttaagcttattgatagtggatacgtctgtttagccggtttggtcgtcacgggcgagtggaacttgcctgacaattgcagaggaggtgtgagcgtgtgtctggtggacaaaaggatggaaagagccgacgaggccactctcggatcttactacacagcagctgcaaagaaaagatttcagttcaaggtcgttcccaattatgctataaccacccaggacgcgatgaaaaacgtctggcaagttttagttaatattagaaatgtgaagatgtcagcgggtttctgtccgctttctctggagtttgtgtcggtgtgtattgtttatagaaataatataaaattaggtttgagagagaagattacaaacgtgagagacggagggcccatggaacttacagaagaagtcgttgatgagttcatggaagatgtccctatgtcgatcaggcttgcaaagtttcgatctcgaaccggaaaaaagagtgatgtccgcaaagggaaaaatagtagtaatgatcggtcagtgccgaacaagaactatagaaatgttaaggattttggaggaatgagttttaaaaagaataatttaatcgatgatgattcggaggctactgtcgccgaatcggattcgttttaaagacgcatccatggctgaatggttaaagcgcccaactcataattggcgaattcgtaggttcaattcctactggatgcaaagatttgtttggtctttcttccttcttttctttctttctttcttttgaactagtttgttctcgtgatccttggatccgttaaggtttcttgctggttcttccttaagatgagaacatgaaccagtctagttctttttgtttgctgtttattttatttcagtgtgtttgaaaagagtcggatagtccaatcc

SEQ ID NO: 494 - DNA, 2291 bp, synthetic construct
  source 1..2291: mol_type = other DNA
tcgttttagagtttatgagaactgtgcgttgtttgtttcaagttccttttgttctgtttcttgccatcatctcaccttttctcatatcctctaccgataaacacccaatcctttcttctttaaacaatctttgtattgttttcttattttttatattttcttatcttgatactcatctctcgggtatcctctttgaccttcgcaagaaggccatctttgatcgcttggatcgttaccaagccatccctcttcctcctccattgccaatcttggcaatttctgttttccctctttcctccccttcttctcaaaagctgactatgtgatcttattaaaattaggttaaatttcgaggttaaaaatagttttaatattgctatagtcttagaggtcttgtatatttatacttaccacacaagatggaccggagcagccctccaatatctagtgtaccctcgtgctcgctcaaacattaagtggtgttgtgcgaaaagaatctcacttcaaatgatgaatgctaatggatttagcggtgtggagaaagagtatataaggaaacatcatcttcatcagcctaaggagaatcaatgcagttcgtttttagtcaagcacattcgagcacctgttcatcttgtttggtcattggttaggcggtttgatcagccacaaaagtacaagccctttgttagcaggtgcatcgcgcaaggagatcttgagattggtagtcttagggaagttgatgtcaagtctggcctccctgcaacaacgagtaccgagagattggagcttcttgatgatgaagagcacattttgagtttcagaattattggcggggatcacagacttaggaactactcctcaatcatatctctccaccccgaggtgatcgatggaagacctgggaccttagtaattgaatcatttgtggtggacgtgccccaaggaaacaccaaagacgagacgtgttattttgttgaagcattgatcaattgcaacctaaaatcacttgctgatgtctcagagaggcttgctgtgcaggacaggacagaacccattgatcaggtctaaagcacaacatttcaaccagaaacactagccgaagcaaatccattccacaagcacctggtgggatcatctcatcatcagaaaccaagagagagattccgtgtccgcttgttgtagtagattgtgaggactgaggaccgagaagcagccatggctctagttgttaaaggaaaagtgaatatcaatgagtttatcgacctgacaaaaatggagaagatcttaccgtcgatgtttacccctgtaaagagtgttatgtgttccaaagttgataaaataatggttcatgagaatgagtcattgtcagaggtgaaccttcttaaaggagttaagcttattgatagtggatacgtctgtttagccggtttggtcgtcacgggcgagtggaacttgcctgacaattgcagaggaggtgtgagcgtgtgtctggtggacaaaaggatggaaagagccgacgaggccactctcggatcttactacacagcagctgcaaagaaaagatttcagttcaaggtcgttcccaattatgctataaccacccaggacgcgatgaaaaacgtctggcaagttttagttaatattagaaatgtgaagatgtcagcgggtttctgtccgctttctctggagtttgtgtcggtgtgtattgtttatagaaataatataaaattaggtttgagagagaagattacaaacgtgagagacggagggcccatggaacttacagaagaagtcgttgatgagttcatggaagatgtccctatgtcgatcaggcttgcaaagtttcgatctcgaaccggaaaaaagagtgatgtccgcaaagggaaaaatagtagtaatgatcggtcagtgccgaacaagaactatagaaatgttaaggattttggaggaatgagttttaaaaagaataatttaatcgatgatgattcggaggctactgtcgccgaatcggattcgttttaaagacgcatccatggctgaatggttaaagcgcccaactcataattggcgaattcgtaggttcaattcctactggatgcaaagatttggtctttctgctatctttgagtccttttctttttctctttcttttgaactagtttgatctcgtgacctctggtccgttaggtttcttgctggctcttcctaagatgagatcttgaaccagcctagttcttttgttgcttttgcttttgctttagtgtgctcaaaaatgtcggatagtccaatcc

SEQ ID NO: 495 - DNA, 19296 bp, Citrus tristeza virus
  source 1..19296: mol_type = other DNA
aatttcacaaattcaacctgttcgcccagaaaatacgtctggcacaacagggatccggaataggtccagcctttaagctctaatattcccacaacaaaaattacactatgtcgaaactcagaggaagcttctggtcttcggccatcgctgttaacagcgattacacgatatcgcgcatctggcgcaaacttaacaccatagtagtcctgcactactttggttttgttagaatcaccaaggtgattcgtgacaaatcggctgatatgccgatagtccctttacggaaatctgtatttccgttttctgttcgcgcggctgtcacgagcttcgtgctgctgggcgtcctcttgacgctccgcattcagggtgcctctgtggccttcccgttatcaacgcatctggcgttgttcgtccccgctctgttcgcgggtttttcgaggttttctctgtgcaaacctccgctcacctctgccgctaagaggtccctccgtcaggcaaagcgggaatctgtttccctttctagccgggcctcttctcgcttctctagggaagtccctcgcggcacacgttcaagacttcacagacgtgtggtgagacgagctgacactgccccagttgagagtccccaagacaagcctacccgacgaaacagccgacttggtaagacttctcacctcccttacgtgggggaggcagcgttggatgatatccttcgctggatcgaagaggttaatcctcatccctcgatggtcgctattccagtgcccatcacttttggaaccatgcctgcaacggcttggtgttcccactctgaagccgcagttttgcgtgccgccttgactatcacgcggctgaaactgatttctccactcaggagaaacacgtacggtacgtctataatgacgtatcttctgccactaaccgtccccgtacggtttctccccgcaagtgcgtccatttttcccagtaaatctaaactgggcgttgaggtcccctctggtagggaccttcacactgcgttcgtgagatcttctcacgcgagcgctttcttctctgacgcggttcgcgcttcgtttgttccgtccagcgcggaacaattttttcacttccgtcgtcagcggacgcatgttcttgctattacagacccggtcctgtgtggtacggtgtctgttttaatgtcggacggtgttaacacagcacgtctcgacgttgttgctccggcgtactatgcgtacgctgaatctttgggcgccagagtgcgctttttgtgggagtcgtccgacgtggacgacgctaaagttcgtgacggtcaatgttatgtccgtcatgtgttcgacgtggctctctactttgggagacgcgccgacctttccgtgcgtagagcgctgggtatgtaccccacagtgggtgcactaaaggcttatcttgttcgcgaatacggtcgcgactctcttaaggttcctatgcgtgggacctacacttttggcagtgtgtttcactgcttgtcgctaaatcttcaagtcgacctgcgatctattcctaaccatcatttagttggtgggacgtctgcccacgtcttaattgggcaggttcgagtcagtgttcctggctcgattgttaaaccttcacgttcggccgttcgtaggcgtaatagacgcatgcgacgtgatggttttctcggtagttccggttcttcttcttctgcgggggagtcgactcgctgttcggactgctcttctcctcgcggtttaccttctccttccgttttaaaaccttccctaggtcggatcccgagtatagatcggcggttccggtttcctgcgggtacgcagttgcgcgtctccgtacctaggcgggtcgatgaccatgtttacgtgtcgactggtagcaacttcgatgagttgtgccatgcagttttgacacgtatgtcaaaaggtacaactctagaaatccttttacactcgattcgagagcggaagggactacttggttttgcggcgtgcttccgttgggggtcttcacacgtgtttgtaaagcgtggcaactttactgcccgatttcctatttcggcggtcaggtatgagaatcagtatgccgcggttatgatggatgtggggactagttgggttccgaagggctacgttcccgatgttgatgttgtgaaacgtcggagaagtcgtaatcgtcgttttcctctttcccatcgtgcggtggatcagtcggtccccgcgttacagtcgagtcctgtcgaggttgcttcggtttcgagtgataagccttcatcgtcgcagaaggcttcttcaccttctacttcttcttcttcttcttttaactcgacaaggagttcagactgggtgaatgtcggtttctctcatcgaactactaataaggttcgtgaaccgcgttatgctggtcatcgtaggatcggaaattttactttcccgaggggcacagtgtacaacacgcctgtcgatgagcgcgcctataaacgtgttcttagattgcgagataccacagcctgttcctttctccgtatactgctagctcgtttgtcgggttacagacctttaagtgacgagttctttaacaagtgtgtcacttcccggtttgtcgcgtgcattgaacctgtggaatcaggtctcgttaaggtgcatttccgttctgatgttttccgtgcctctttcccgtttgacggtcaacctatacaccccgccacggctttgacattggaagtggtggtctcttgggattggatggttacggcttttcagaatcccttgaaggatggatattgctacattcgccatttcgccgaagttagtttgagcatggggcgaattttcttcaggagggacgtcgacttgggacctttcccatacgttttcgaagtgcaacaccgtcttgaaaggttgtacgggaaagctgcgttaagatacggtgttaggggtcaatattcagccccgcgctgttttcactgttgctacaacgattcaccgagaccgatggcgtcctttaatgggtaccataagatgggtggtgaagataactccctgataatcacagacaccgacaggttgcgtgctgtggggagtgcctatgaaaaagtgaagagaaacataccagattcgttattggttcggtctgtagaaaaggaccttatagagtttaatcagactctagtcgacatgcatcgatccagaccgggcgttgtcgtacctttccaaatgagtgagaatcagcaagtgatgcttactagggcgtacccggaatttaatattaattttattcattccgtacattccgatcatccggtggcagcaggttctagggcgttggagaatcatctcgttcgtaaacacgctggtaccgattattcggatgtggggggttgtccgctgtttcatttacgtgcgggtcactccggcgttcacgtttgtagaccggtgtacgatgttaaagacgctcatcgtagagtagtccgtcatcaccaacttagtaaggtttcgctagatcagagtgacggtgttaaacaagttggctggaccgtaaacacgaattctgtatgcggtaacattttgggagagtgttatcatgcatcggaggcgatggttatggttcaagtttatgacgtaccgctacgtgagttgtgtagggctatgataaacaagaaaacttccgtgtgttatatgaccatggttacacctggtgagttgttggacgcccgcgagtccttttttattaaggacttggattgttcggttgagttagatcccattgcagacagggttgtttactgtttcaacaattctgcgtatacacacacgtactccactatatgtgagtgtatgcgaactccttgcttggtagtggacgggtttttgtttactatcgaaatggtatcgctcaggtgtagcgttaattactattgtatcaccaagtcgtcggtctgtccgagaattagtgagactaagcggttgcgctaccgtcggtgtgatagcgacttgattagaatcaaaattccccggtactccagtaagactcgtagttgtttacctgggtgttactatttgtacttggacgccaagtttgtaagtcgcgtgtacgagtacgtggtcaataactgcgttgtggtgaacgcgaaaacttttgagtggacttggaattacatcaaatcttgcaagtcgagagtggtgatcagcgggaagattatacaccgagacgaaccaatcgctttagagtacttagatgggttttctgcggttatgctgtccgctggcgtgaagggtaggcaaaacgcggacgtttctagacgcttagccgctttttcgggtgaaacttcgattttcgagttagtggggtttgctatatccgagaagtgccgcgacttgttcttgggtattcaggacgctgtggaaagatgcgtgaagtcgtacctcaggaattcgtttaatatgagtttcgtggacttgtccgaccccttacttacgattagcgaatattcagaattggacgttcctatcgacttaccgggtttcggtggaatagtggacggtaacgaaactagacttatggaagacggtgttaaatcggctttattacgtaaagcggttcaagccgaggctcagttgagtcttaagagaggcaatacttccgaaatcgttccgtgtgatgacgatgacgactcgaacggtgatgattcgcgtgtttcgctcgatacggactggtggttcgtccttcggggtggtagttctggcgggttgcgagctggagccgccccttctttgtttaggtgtttactcaggaaattgggtgggggtttatgtttggcaaagaaagtgttggaactgttagtcaagcgggtggttgaatcgttttctcgtttgaagcggaaaaccgctcgtttaacgtccttcgctaatttgttgcttgcgaggctctcttgcgggtttttcgatgacactgttttttctgcggtctgggaaatagcgatcaacctgaccaggatcgtcgatggagtagtcaagacaaaactggggtgctttcgtaatttatttcgattgattcccaagttatacgctggttgtaaggacgttgtgaaggacgttagtaacgcttacaggtcggttgtctcgttttccgctgaggttttgggtaagagttactctaaactttgtcagttttgcttggaaatatttgacatcgggcttattgaggtttctgctcgtaatttgggactggaaacatgcgtttcaatagcactagctatttttgatgtgttgattacttttcctttggggagcgttagttttcccgtcgtttgcgctagggttttcggtcgtctcgctatggaagtgggatcgaactttttgtttaagaaagttttcggtaaacccgaaactcttggtgaagatactttccgtaggactgtgagtatggttttgaggcccaaagcgtttgacaagctttccgtggatgcgaaaggtttagttaggtgctctggtgttattcctggagtgttaaggataatactatcttccttgttttccgaagatgacgcttgggtgggttatagtaaacatgaagtttcttcccttcctattgttaccttttgtgtgaagagattgtcttattctctggagcggtgtaaggaagcgtgtgtcgcatttattgttgactctgctaagaagattttgaaatctttaacttcagagttcaacgaatccattcaaaactccgacttgaccagtggtgctaagtccttgtacgggcacgtgagctcgatactttacacctctagtggtgtgattaataaagcaggaagcgccgtcgctactgttaaagcggtcgggagtgatatcagtggtcgtgtgaaacgtatgcgaccccgattttctctgtcccgtcactttgacgagcagactagtgagtactactctgctagcgattgttccgaactagatgagtcgttgtttagtgaaacgcctggtcttcgtggaaacgccaggtgtagagatttgtttcgtatcgtgtctagacgcgcggtagcgtgttgtgagtacgtgacaattcttttgaaacggctagcgtcgcgtgccggtgaatactcctactcgtatgtgatggatacgctcgtgagattgtatgtggcgaccgatgatgttgttagacggtgcaggtcctttacgttcgactgtactgataaagcatctaatttcgtcaccgggtttcttagttggcgcagcttacgttctggtgcgtactctgcaactccagggttgggtggtggtagtagaggtttaacgtcgttttctcacaccggtggattcacgcgcgttatcggcgctcttgggaacaccttatcggtggtgtttgatgaggaattcttcagaactttgctgcatcggttgagggcagatgttgtggttttactggtggagttcttgaaaaaccttcccgtttgtttgttttcaatatacacttttattgaatgtcggggtaggatctttcctttaagagagttcctatggggtttttgtcgtttcgtttgggatgttatcgaggggttgtccatcaatacttatcaatacctctctgctgtcgctgagaaagtgtatcgaggtgcctttaatcgtcgatttaacgaagaggatgagaggacgcttcgagtgatcacggaagcagagggaagaatcgaatttttgcgagttgttctcgcggaaatggaaaggttccgtgctgcgtcgaacgaggtttcttcgtcgaggtcgtctgatagtccttcattcccacctacttacggtgaaattgaggagttaaatgatgattcctccgatagtgcgctagtgataggcgtcgacaacggtaccggccgcactatcgttgacggtgagaccgattctgcgtccggtagcgatagtgacgtttctatcccgttggatcgcgattttgaacaaatcgggcgtcttggcggaaacggtaacgtcgatgtcgttcggctgggtttgaaattcgttctgaagttgttacgcaacctattcgatgctagaagttttaaagtgttgtatgggttgttacttcaaacccttttttatggtggttcggtaaataaatttgtgtgtcgtctggtctttagtcttgggacttgcttacctttcgagttactccgatttgcgtgttcagcgaggcggttgttgaagagtttggcatcatttgtttaccagactaaccttttcagcgaagttatggtggagcatttgtttagcgtttcccgactgctttatgattcccggtacttcgcgactgtgttttcggaattggagagacttaacttctatttagactatttcctttcgctcccgaagagatatctattccctaattctagggctcgtagttgtgctagggttccggttcccgtgattaggaccgaaggagtggcaccagtccgtgagagatcactaaatgacatactggactctttagactctttaaaggtgtcggacctcaaagggaagtcgacgttcgttgatgatggggagtcggattccggtagtgaacattcgggtagttcgatttcgttcggttccgtcaacgaagaagttttaaatgcggtaaatggtgacagcgtttgcgaaaaagccccgttgatgaagcatgttaccgcacttagcaggttggaacgccaccctagtggtcgtaaagacattcctgtttctaggaaaacttttgtgcgtggtgaatcttcgggtgtgaaatcgaaggtgagtatgtgcgattacttggtgaccttgaattcttcgtttggcacagtgcctgacatgtaccctgttgcgcgtgacataacgtataagaaactgactaacgccatgcgcgaattctattactcgcaaaaaataaccttgtacgaacttcacgggaagttgagttcctattgggacgagttgaaggtcgcaggtttcgatagaaagttaacgagaatggatttggacgatgatgtctatgttgttgactttaatcggaaattgttggtggggagaaacggatctcatccgtttcgtaatacgttaaagtcctattgttttatgttttgtaacgatgggttggttccttgcccgcgttctcagaaatatgattatgctttgatttctaatcaaacgtcttttgttgccgcgaattcgttcttacgtgccgtggatggtaaggatttgacttttaccaatgaggaacatagccttatcgtttatgaagctcctcccggtggtggtaagactcattctttggtgaattcgtacgcggattattgcgttaaagtatcttgtttagtagtgaccgctaacaagaattctcaaaccgagatatctcagcgcatatctaatgaattgatgggcaggaagctagctgctaagtatgttaccgatgcagcttccagagtgttcactgtagattcttacttaatgaatcacttgcgacttacgactcaactgctgtttatcgacgagtgcttcatggttcatgctggggcaattggagccgtggttgagttcacgtcttgtaaagcggtggttttctttggtgatagtaagcaaatccattacattcaccgaaacgatctcggggtttcctttgttgcagatattgatgcgtttattcaaccggaacatcgtatttacggcgaagtgtcctataggtgtccttgggacatttgcgagtggctttccgagttttacccgcgacacgtagctactgctaatgtagggagtattgggaagtcgagtgtgtcaatagaggaaatcaatgggtgcgatgacgtaccttacgacaaggcggcgaagtacattgtgtacactcaggctgaaaagaacgatttgcaaaaacacctcggtcgcttaaccgtgggtcggaacaaggtagtaccaattgtaaataccgttcatgaggtacaaggagagacctataaaagggtacgtctggtgaggtttaagtatcaggaggataccccgttctcttcaaagaatcatattgtggttgctttgactagacatgttgattctttggtttattccgtacttactagtaggaggtacgacgatactgcgactaacatagatagggcgaaggaaatttttgacaaatttcgttcgtcgaatcactcgtacggttcgtcatcgttagagtggtaccttgaaaagtatcctaccgaatataagggtagtaaagcatcctctgctccgataagttgcattaacgaatttcttaatgaggtcgtcgttggttcttctgtcgtgcagttgggtgatgtgtctgaagaactaagttcacgtccctttgaatcgggttgtgataatgttactgtaagagacaccgcccctcctgactcgggtaacttacacgaaccggctcgcgttcggcgtagtaaggtcacaagcaattcctccaagaaaagcgtcactgcaagaaaaccttctgtcgtacgaaagtcgtaattataactttatcaagacggaacggtttgttggaccaagcgaatttggtagggcgatggctgctgctgttatcgaacgttgtttcaaaatggaagagatggctaagataaggtgtgatattatatcccttactgaagctaacattttaaaatggctcgataagcgcactccctgtcaaataaaggccgtacacggggagttgaaacttcccttttcggtggaggagcaaatttccaacttcaaactgatggttaaacgtgatgctaaggtaaaacttgacgattcaagtctatctaaacatcccgctgctcagaacatcatgtttcataagaagtttatcaatgccatattttccccgtgtttcgacgagttcaaaaatagagtgttgtcctcgcttaatgacaatatcgtgttctttactgagatgacgaacgctgggttagcggaaattatcagaagaatcattggtgacgacgacaacttatttgttggggaagtggatttcagtaagttcgataagtctcaggatttgttcattaaagagtacgaacgtacgttgtattccgagtttgggttcgataccgaacttctcgatgtgtggatggaaggtgagtatcgcgctagagccaccacgctggacggtcagctgagtttttcagttgatggtcagcgtcgttctggaggttcaaacacttggattgggaattccttggttactctaggtatcctttcgttatattacgacgtttcgaagtttgacttactcctcgtttctggagacgattctttaatttattcgagtgaaaagataagcaacttttcttccgaaatttgcttagaaacaggttttgagactaagtttatgtctccgagcgtgccatatttttgctcaaagtttgtggttcagaccggtaacaaaacgtgttttgtgcctgacccttataaattattagtaaagttgggggctccacaaaataagttaaccgatgtcgagttatttgagttgttcacttcttttaaggacatgacgcaggactttggtgatcaagtggttttggagaagctgaagttgctagtcgaagctaagtacggtttcgctagtgggaccactatgccagcattgtgcgctattcattgtgtgcgatcgaactttctgtcctttgagaggttatttcctttcattaggggttggtatgttgttgacgctctaaaactcagacagcttaggaaactcactaatttgatctgtgaacgtgtagtttacgacaatcgggtgagttatttttcgtacttcgataacccgttcactaaacctgacgctaacgacgataacgtggacgacctcggacaagcgggtgaattagcaaccggctgatcgattgattagttctcgctgagagctaatgtgggtagttgagtcaggatgtttgccttcgcgagcgaaagccaagacttgttagaagaaaaagtttttcgtcgtagaacttaccatcgtaaatattttggtgacgtggttaaggacttcactatcgatattggttatgatactaccgatcgcgatcctactgtattggccgattatttctcattgtatttctttttacttaacaacgatagtgttgggcctatagcagcctcaattgtggtaagcccaccggttagcgggactcataaaattcgagcgcatatcgataatcaaccgaactgtgaaggtaacgtgacttacgttaaaaccttcgacaaaagtcgctttgtgattcgcgttaaagcgtccccgtctatgagaggttactactcttttcgggtgtttcttagtagcgatgtcgctagcgaacgcagcgagttcgtgtgcagttttgttggtagcaggtttctttgctgttgtacacaaacgatatctgaaaatttgagtaaagtttgttcatcttccttcttcttcagagcagtttcagaaaccgcgaccaacgaattttctgttgcgactgatgatgtggaagacgttaagtacataagaaaacaagccgagggtttttcacgttgcgctgacccataccctcctaggtgttatcgtagcactaatttgggcgattcttcaggggttcagagtcgtacgattgaagaggaaggttatatgacgggcactgcaggtaacgtcgcagtcaccgtcccgaatactccactagttagtgctgtctctccgtatatcgcagggtacaacgagaatgcacgctcgcgcgtctcattaatacgccgggtctgttgttacgccgtttgcgttttagtggtgtccgttcttataatgagcggtttattagccattatatttatatgatttagtgtagtaactcataaggtacaattacttacttaagactcgccgtttgactctgtttaaacggggtttaatggactgcgtaattcaagggtttttaactttcctagttggtatagctgtgttttgtgcctttgccggactgattatcattgttataacaatttatcggtgcacgattaagcccgtcagaagtgcttccccttacggcactcacgcgactgtctaagcggtatggtgcttttgggtttagacttcggtaccacgttttcaacggtggctatggctacaccttcagagttagttatactcaaacaatccaattcatcgtacatacctacgtgtttactcctgcatgcggaacctaacagcgtatcttatggttacgatgcggaatatttagcggcttctggggagtctggttcgttttacaaagatttgaagcggtgggttggttgcactgcgaagaactaccaaacctacttacacaaactatcaccttcctataaggtgatagtgaaagagtttggaactaagagcgtgccggtgccatatttgtcacctctgaataacgatttaggactcagcgtcgctttaccttcactgattgcttcgtatgccaaatccattctgtcggatgcggaacgagtgttcaatgtaagctgcactggagttatatgttcggtacctgctggttataacacgttacaacgagcttttacacagcagagcatatcgatgtcgggttactcttgtgtgtacattattaacgaaccttcagcagccgcgtactccactttacctaagttgaattcggcagataagtatttagccgtttacgacttcggcggtgggacttttgatgtctctatagttagcgttagattacccactttcgccgttagaagttcgagcggtgacatgaatttaggcggtagagatatcgacaaaaagttatccgataaaatatacgaaatggctgattttgtgccgcaaaaagaattgaacgtttctagtttaaaggaagctttatctcttcaaaccgatccggtcaaatatactgtgaatcattacggaatgagtgagaccgtatcaattgatcaaacggtgttgagggagatagcctcggtgttcataaatcgaacgatagatatacttacgcaagttaaggttaagtctagtatgcccgaatcgcaaagtttgaagttagtggtagtcggtggaagctcgtacctaccagggttgttggacgctttggcaaccgtgccttttgtgtctgggatagtgccggtggaagacgcaagaaccgctgtcgccacagggtgcgctttgtatagcgagtgcttagatggtaggtctaaggccctactaatagattgtattacgcatcatttgtcggtcacgacgtttagcgcggattcggtcgttgttgcagcggccggtagtccaattccttttgaaggtgaacaaaaactcacgttacgcaaatgcgttagtacgtctaactatcaagcaagaatgttcgaaggggattacgaaaaagttttccgaaatgaacgtatatacgcagcttcgatatcattgtttacattaggagttaattggagtgtgcctaacgacgttgagatgactctcgtgaccaaagtggactcgatgggtaaagtggaattttaccttaaaggtccatctggtgaactggttaacgtgcaaggtacttcgcattacgattatgctggtatgcctcaccccactagaaagctggtgaggcttagcgattacaatgtaaactccgccgctttagttttagctttgacattaactcgcgaaaaacgagaaaagttccttttgcgaacattatttgacactttactagcggatttacgaaagacagcaagtttaggcgagtactcaaagaagtacccgatcactcgaaacgatatcgatgtcgtctcatcacgtatggggatcgttgtttcgaaagttttacggggaagcgatttggaaagaatacctctctgaatcaactcgaaatttcgatgaaagaaatgtatcgttagaccacactttgagttcgggtgtggtcgtccgtaggcagagtcttttgaatgcgcctcaaggtactttcgagaacgagttagcgctattgtacaattcggtggtgattaacgattttgttgagttgactggtatgcccttgaaatctttgatgacaggtatcgaagaccgtaaggtacctgacgaattaatatccgttgacccgcacgaagtcggatgtagattcacgttaaacgacgtggaatcgtatctaatgagcaggggtgaagatttcgctgatctagcggcggtcgagcattcgtggtgtttgagcaactcttgtggtagactattaagttcgactgagatagatgcttacaaaaccttggtgtttactaagaattttgatagtaatgtatccggagtgactactaagttagagacttatctatcgtactgcatatcattgtacaagaaacattgcatgaaagacgatgattattttaatcttatcttacctatgtttaattgtttaatgaaagtgctggcgtcgcttggtttgttttatgagaaacatgccgacaatccgctactgaccggaatgctcatagagttttgcctagaaaataaggtgtattactctacttttaaagtgaatttagacaacgtcagattgtttaagtctaaagtgttgcctgtggtgttaacggtttgggatatatccgagcctgatgacccaatggatgaaagggtgctgattcctttcgatcctacggatttcgtgctcgatttacctaaattgaatatacacgatacaatggtggtggtgggtaatcaaatcagacagttagaatacgtagtcgaaagcgatgctttagacgatctatctcaacacgttgatttacgtttagcagcggacaatcccgatctacgcgttggtctgcgttgggcagggatgtttgtgtactacggtgtttatcggtgtgttgttgatagagcggtggaacgaccgacgttgtttagattgccgcagaaactactgagtcaggatgatggcgaatcgtgctcattacacatgggttccgtcgaagctttattcaatctggtgcagaaagtgaacaaggacataaacgttagacgtcagttcatgggacgtcatagtgaagtggctttgcgactgtatcgcaacttaggtttgaggtttccaccgatctcatcggttaggttaccggctcatcacggttatttatacgtcgatttttacaaaagagtacctgacggtgctgttaccgccgacgaactcgaaagtttacgtcaattacgctcatccgtggacgttatgtgtaaggacagggtgtcaatcacacctccaccattcaatcgacttagaagaggttcttctagaacatttagaggtcgaggcgcacgcggtgcgagctcgcgtcatatgagcagagacgtggcgacttccgggtttaatttaccttatcatggcaggttatacagtacttcctaaaaccgatgataaagaaatggatcctgtgagtgctgccgtgcccggtaagtatccggatgtcattgaaaagttcgtggccaataggtccgtagatgcgttaatagaaggcgttataagtaaattggataccaattcaatatacgaagattccactgaaaagtttactggtgaacacttgaaatacgttatggttactatggacactttcttattagaaaactacaaaacgaaaacggaagatctgttggttcacttaactatgatccaaaagaggttatacactatatccacgagcactaaaaccaagtttcgcgataaaggttgtattagttacgtacaagggggtttacgatataagttgttggacaaagtagtttttcctttcattatatcgaaatttaccgacagggagactccaaacgctctacgtaagtttgcttgcactttcgaggagttacacttgtgtatggctaggttaagacccgacttatacgaaaataaaaggacgaccagggctgggactccacatttaaagggctacctatcagctgactttctctcaggttctctccctgggtactccgaacatgaacgaggtatcattcttcgagcgtccgagtctatgttagctagacgtcaaggttacgaggaggcgaccgagcttcttaacctacgcgatttgggtaagtacttatagttggtttggggacggtaacattatactatcccatgagcgctgccttaagggtcgttaattgacgacttttgatatatttactaggtttgaattatggacgacgaaacaaagaaattgaagaacaaaaacaaggaaacaaaagaaggcgacgatgttgttgctgccgagtcttctttcagttccgtaaacttacacatcgatccgactttgataacgatgaacgatgtgcgtcagttgagtacccaacagaacgctgctttgaacagagacttattccttactttgaaagggaagcatcctaacttacctgataaagataaggactttcgcatagctatgatgttgtatcgtttagcagttaagagttcatcattacaaagcgatgacgacgccacgggtataacgtacactcgggagggtgttgaagtggatttgtctgacaaactttggactgacgtcgtgtttaactctaagggtattggtaaccgtactaacgcccttcgagtttggggtagaactaacgatgccctttacttagctttttgcagacagaatcgcaatttgagttatggcggacgtccgctagacgcagggattccggccgggtatcattacttgtgtgcggatttcttgactggggctggtttgactgatttagaatgtgctgtgtacatacaagctaaagaacaattattgaagaagcgaggggctgatgatgtcgtagttactaatgtcaggcagcttgggaaattcaacacacgttgatctgttgcgttccgattcccggtttctatcgggatggtggagtttcatcgtgaacgtgggtgatataatcgtccggttcgcgttacacgttcctaatgaagatatgctgaatagtttttcagctatatcgaattgtacgattatagcggacggtagtgctttactaaaagataatactgtggtcgatcgtttagaaggcatgaatcctttggcttatttattaaaattagcgaaaacgactactactatttgttttactatgtctaataaggttctttttggtactactaaatccgaaccacttagttgtttagctatcacgtcggatcgagttttattcaaagttgttatgggtactaacgttgacgattctcgatgcggctgcagtatttggttttacaacaacggtacgtttcaaaatggattgatccgttgtaataatctcgtcactttgtttagcgtgacttagacacgaagtgactgttcggattcaattgctgcaatgagcattcggcgctcgtggttaaaggttatggctgtagttacggtattatggtacggtaaagagccttccattagtgaaggttacaatgctctcatgaatgatgactttaagtttatcgatacgcattttacaaacgtttcttacgctaagaaatgttacgatttggctaatttcgatttagactttctacgcatcgttatcattcctttgagtgggggtacggtgaatgaatcgcgtgctgatcgcactaacgtttcagaaattgtcgaatcgcatgtgagcgaccgagacaggatgagcatcttgttgcgtaataagcggatccaaattccttcgctcttaccttgcgataactagagtctactcagtagtacgtctattagtataacgtattaagcactttagtaaagggttttgtttaaatcaaacaatatgcgagcttactttagtgttaatgattacataagccttttggctaaggtcagcgctgttgtggaacgtttatgcgatcccagcgtaactcttgcggaagtgatggacgaaattaatgactttaactcgtttctcgctttagtgcactctatgaagtcagacatgaacggagaccatcaggatggccaccacgagatgggtgaacacaagtctcggttgttatgcaacatagaggcgaaattgcgagtacttctcgacatcataagacgtcggttcactcgcgacaagctgctctgtactagcgcgacagatgtcatgggcttctttgtaatgaggtacatgagttctagccacaccagcttcgaatccgtaatgaggacggagttgaggttggtggttaaggcggtactgtcggatttatcccgcgcgcataaactggattttagcgagcgagcttttgcggcttatggtatccttttgcaaaagggtactgtgtcgaccgtttgcggtcagtttgacattaatttagtctctccatcttgcgtgtaggttaatacgcttctcagaacgtgtggttgtattaactaactttaattcgaacaaatatattgtgaaagtctgcgagttacaatggataatactagcggacaaactttcgtttctgtgaacctttctgacgaaagcaacacagcgaccactgacgtcgaacccgtgagttcggaagcggatcgcttggattttttacagaaaatgaatcccattattatcgatgctttgatacggaagaatagttatcagggcgctcgctttcgcgcgagaataataggagtgtgcgtggattgcggtagaaaacacgataaggggttgaagactgaacgtaagtgtaaggtcaacaatacgcagtctcagaacgaggtggcgcatatgttaatgcacgaccccgttaagtatttaaacaaaagaaaagctagagccttttctaatgcggagatatttgcgattgatttggttatgtacaccaaggaaaggcaattggctattgatttggccgctgaaagggagaaaacgagactggctcgtagacacccgatgcgttctccggaagaaactccggaatattataaattcggtaggactgctaaagcaatgttaccggacatcaacgccgtagacgttggtgataacgaggaaacttcgtcggagtatccagtgagtctgagtgtttctggcggagttctccgcgaacaccacttcatctgattgaagtggacggaataagttcctcgcggaactttgtgttgggttggtaaagacccttatgatggtgatatatcactagacaataaccggatgggtaaagtctttaaaatgatcgaggggaaaattaaccgtatcctctcgttggtctaagctcccacagagtggtagtggtctcaagtgaggcttaacgtatgcgtgaaccaaagaagttctccttagagtgtgtgttgtttacccaacgcactgtccctatggggggccaacataggtcca

SEQ ID NO: 496 - DNA, 3439 bp, Spinach latent virus
  source 1..3439: mol_type = other DNA
gtggtattgtgcattattattttaacgcacaacccggattaatcaggttttctgagtatatacccgttagtactcaatggatacaattgttcaaatgaaagtattgtgttacgagtcgatgatattattaatgataccttcagacgtaaacgcaccaaggccggaaactgccattggtaggttgatttccgatgccgctgtttcaggtgttttgcgacaatgcgatttcactgcagcggaagcctctcaatgttttgttccaattatcaccggaagatcagaatgcattgagacgcgattttctggaagagaaatacagtttcgcaatttttcgtattcctcacaatcattcgctgctgcgcatcgagtgtgtgaagcggattatatttatagtcgattccagacgagaaataccacgatcattgatattggaggaaatttttgcacccatagtaaaatgggtagagataatgttcattcatgttgcccgatattggacgttcgtgatggagctcggtatactgacaggttcatgtctgtggcgggggctttggaaacccagcctgaccgtgagctcagactgaactattgttccaataaatttgaagattgtgatgtttccgcaccatgggcgatggcgattcactcgatttcagatataccgatcacaagtgttgttaagcattgtttccgcagaggggtcaagaaattgatagcctctgtgatgatggatcccatgatgcttgttgcttctcaaggttttatgcccagattgaatgttcaatgggaaattgaacctgatgaggagaacaaaggttcccggcgaatttcttttcatttcgtcgatgctcctggattgtcatatactcataactatgacgtgcttatgcagtacatgacttgtaatcaagtcataatcagtgggaaagccgcgtatcgagttgagcgcgttgcagatctgtctggtgtttttattgttgagattaaccctggcggcaactgctggaatgaaagactggatctagttcccatgcgagatgtttcatgcgcgtggatgacttcgttaaaacgtaagaccttagtgcgggttgccatcccgcaatatattcattcatgggaagttaagtatgtgattgccgacactgattttgttagaagagttgctgaagtgtcgttccgtcagtataaaccagaaacaccattacaggatttggtgaaatctgttgcgacgatgatttcctctgcttctaaccattgcattatcaatggtgtcaccatgcaaactggtacaccgttggccattgaggactatgtcccaatggcggtgacttttgttgccttcgctaaatcaagatatgattcgataaaggaaggcatgaaaatggttaggcagagaggtactaatatcgcggatcctaatgatcattatgattatgagaaagatggatcggatgttaagagtttttcaaatcacataattcccatgaagaataccatcaagtctctgtttttccccatgaaagtgaagatgaatgataattctatgctcatttatagtcaaggaatcttgtcaactgttgttgatgagataaaaacactttttggatgggatgtttgggacactgacgatgcggtaatacagtctctgccctctttttataagatggaggatgtttttcaagttacgtctgaccactattgtttatcacatacattatctgtggattggtggttggagggactgtatgattcttaccatgacatgcgtgttgcgcataaaaagaaacttgatgaagaagaatctcggaagaccaaggtcgagaatgccttattgaaaattgctgaggttttggagaaacctgatgttagcgatggtcttaaagctctttcagaattgcccataatatcatcattattggagaagaagagcgaagaaatcgttacaaaacctcaatgcagggatactgaaaaaccccatattaatccctatgctgatgcaatcaaagaggcgcaggcctattacgaagagcttgaggtcgtaaatactcgcaatttgagaggtgttggtgattacctcttttggcgaaagaagtcgaactatgccagcgtttggggcgctgatgaatcgagagtggttcttgaacctatggcaaggaagttttactctcgagatagaaatgtttccatacccgagtatgagcgaggtatgacggttgatggtttcgtctccattaaatgggtggacggaaacattactgaggacacgtggaagtgtctttccaaatacgcagttgttttgctcgactcttcttgcgtgtttgatgccggttcacgtattatgccaggtctgaaaaaggcattggtaatggatgcaaatttcaaaatcgtgatcgaggatggtgtggcaggatgtgggaaaacaacatctctcctcaagcaagctaagccggattcggatttgttgttagctgccaaccgtgagactgcaaatgacgcaaaagccagcggcgttattcctaaagcgcttgaataccgagtgagaactgtggattcttacttgatgttgagaacgtggttcacagccgagagattgctcgttgatgaatgtttcttggtccatgctggcttggtctatgcagctgccaccttggcacgagtgaaggaagtaatagcttttggtgatacaaagcagattccattcgtgtctcgtataccaactgtcaaactcagacacgcgtctgttgttgggacgttgaagccaagaacaattacctacagatgccctagggacgtgacggcagtccttagtgagaaattttatggtactaaggttaagacgtttaatcttgttaaacagtctttggaattgaaaaacatagattctagtaccgaaatacctgtagaaaaggatacgctatatatagcgcatacccaagctgataaacatgctttgatgcgtttacctgggatgaatggtatagaagtgttaactactcatgaagcccaagggaaaacaagagaccatgtgatacttgtgcgtttaagtaaaactaccaatttattatattccgggaaaatgcccgatgctggtggttcgcacaatcttgttggtctgtcccggcataagaaatctttgagatattttagtgtctttgccgatgatccagacgatcaaattgcgactggaattcgctggtccaaaacattggatgagcaagagttagcagcttatagagctgctggttagtgttttatttataaaacctggttaagggtcctccgggatgtgctcagcacctagcctaagccaagtccatatgcccacctatgctgctccgggtggatgcttatacatgctatggatgcctacatttgaaataatgtagatgcctaatactctctctcagggagagagtttagatgcctccaaaggagatgc

SEQ ID NO: 497 - DNA, 2939 bp, Spinach latent virus
  source 1..2939: mol_type = other DNA
gtattgtgcagtattattttacgcacgacccggattaatcatttttgtgagaatatacccgatagctctcaatggattcttaccacttcttatctcagttgtgtgacttgaatgttctgactcatgcgctttatgttaatcaagtgtttgagattgtggatcagtccacaactagttatatgcagatgtggctttattcccgtgttattgtcccagttttgaaatatcatctcagtggagatattatattggataaattgcacgatgtgttccttggaacctttcgttcaatgatggtgccgatgattatgttgaaccgactttcattcgtcgtgaagatgacgacgatgaaccaccaccggaaagcgtatttgccgcttgaagaaagggaaaaaattcatgctgcgacgtttcttggtcatgatcattgggcaagcgttacttcgggatcatctttttatgatgatctcgaaattctcgctgatgagaccgtgaacgatgatttgcattttgataaagaatcttccatgccagatgagtatcagatcatgtggaatgatggtacaattgattccgtttggtctagtcagtttgaatgcgaagaaccaccgaaaccgaaatttataccacgcccttctgataaggtgtgtgatccagtggttattcaagatgccgtgaacgatatattcccatttcatcatgagatggatgatcgatatttccagacgttagtggagacacaggatatttcccttgaggtttcgaagtgttggatagatgcctccaatttcagagattttgttaagggtccaaattcttatgttgagcctgtgtttcaaaccggtgccactagtaagagagtgcatactcaacgtgaggctcttttagctgtgaagaaaaggaatatgaatataccggaattgcaatccactttcgatcttgatgcggaagtcaacacgtgtttcaaacggtttctcacacacgttgttgatttgccacgattaaaaaggttgcaacctatgactggtgttgaggtggaatacttcaatcaatacttgcttgggaagaatccacctgtgaaggaatatcaaggtcccttgacattgactgcacttgataaatatatgcatatggtcaagacgattgtgaaaccagtcgaggacaattcgttgaagcatgagcgacctttgtgtgccactattacctatcataagaagggtatagtgatgcaggcctcacctcggtttttgagtgctatgtcaagattggtttatgtcttgaaatcaaaaatccatattcccagtggtaagtggcatcaacttttcacgctggatgctggaaaatccgatgccgtaaaatggtttaaagaggtggatttttcaaagtttgacaagtctcagggcgagttacatcacaaagtgcaggagaagatatttaatgctttaaagttacctcccggatttgttgagatgtggttttccgcccatgagcgatcacacattgtggacagagaagcagggattggattttccgttgattatcaacggagaacaggagatgccaatacgtatttgggtaacactttggttactttgatttgtttggctagagtgtatgatttatgcaatcccaatattacctttgtcatcgcttcgggtgatgattctttaattggaagcgtcgaagaattaccgcgcggaccaggagaatttatttacaaccctgttaattttgaagcgaaattccctcataatcaaccatttatatggctcaaagttttagtaagtgttgatcttgaggatggtggaagagaagtgatcgctgttccaaaccctgcgaagttgttaattggtatgggaagacgagactgtcaataccaagctcttgatgatttgtatcaatcatggcttgatgtgatatattattttagagatgctcgcgtgtgtgaaaaagttgctgatttgtgcgcatatagacagacgcgaagaagctctatgtatttattaagcgctctgttgagcttgcctagttgttttgctaataagaagaaatttaagtggctctgttatcgtttaagagagcaagggtgtctgaagaaggatatttatcctgtagcaaaacctataagtgcccataatataaggaaagaagattcaaatggatgcgatgttaatcaaggaacagatgattcgttctcacggaaaaagaatcgtggatgctgggagtatgtcccaaagatgttgcagactgatgtgtctgttcctgttactgataaatctttccacagtaacagaggctcgtcggtttccccaaccgattgcggtgatggagggtgctccagatccgccagctcgattggtagtaaaaataccaaacctcgccatagatttcgagctgcaggagttcaccaacccagcggtcgtgatccagaccgtataccgccgaatcatcgacgaagtgcctaaaggttggtatggtttaaagtcctggtcttcctccaattatggagacgttgtggccggactaaaaagggctgcacgagttaaagtgcatttttctataccgggttcagattgggcttataccttaaatctgtccgaagtggtatctgggttagcactccccaaattaccaattcccgagaaatatctcaggatgccgattgctatcacaatcgatgataccgtcaataaaattggcgatggttttgatgatgtaccatctccatggtacttgtatcaatgatgtgttcctttcatggaacctagtgaggggccctccggggtgtgctcagcacctagcctaagctaagtccatatgcccacctacgctgctccgggtggatgcttatacatgctatggatgcctacatttgaaataatgtagatgcctaatactctctctcagggagagagtttagatgcctccaaaggagatgc

SEQ ID NO: 498 - DNA, 2735 bp, Olive latent virus 2
  source 1..2735: mol_type = other DNA
gatatttcgcactcctagtgaatcttcctagtatatccgttgaaaaaacgagagtgcaacaacaaaaactacagagttctttttttttaaaaaaaaaaaaaaatcaaagagacatggccggagtactttatgatgaggagtacgttccccaggaaccggattacttgtattgcccgtacgagtgggagggtgaagatcctacccaatgcgatgcaaatgttccgtccgtcagctaccttgtggaggctgtaaaaaaatcctttactgagggtaaccacgatatgctgatttcttgcgagtcgtaccacgccgagtgttgcgagggtcccttgatgaacaagggtttgaccctctcgacttactttatgagttatccgggcatttcattacctgcgttcggcggtggtgtgattcatgtcacttcagctcgcgtctgcatgcaagctttttatgccgtgaccccaggaaggtgtagttgttcgtgtggtacgcaattcatctatcgtgccaaaggtggaactggtctaacatttgacgccacgaacactatttctagtgcctttaagttcgaagacgggaaagtgaaatggttaacagaagacctaggcttggcattattggctggttgtttcttgaaatacgtgccaatacctcatgagattgaaattaagatcgaaagaaaggtcgagcccgtgtctgctctggatttttgggaaccagaaggattgatttctgacgtacatttcgtacatccgcaagagagagccttggctcctgagcctccaatggatgtagagatggtgagattagtccgtacggaattgtttgaacactttaatcccacccttcttctgaacgctcggtcggatttttccggtgagaaactgaaagaggttgagttgccacgagctcaatcggaacccttagtccctagggtctgtctcccgcgaggtgatgacgctttaattgatcagtttttcatagacaaggcacccgagcattttaatcgtgaacctgccacagatcaatggcaggtggaatctgatgactttactgtggatttccccacccaagtgcgattacgcgaacgggacgaagattggttcagaaggaaacccgatttcgctgtgtcgtccattcgtacaggtctcgagatgcctcgaattgctacaaagaaggaaatgttaatggcattctcgaagagaaacgttggagctcctcagatggtagaggtacctcaggagatccacgtgaagaggttggctgataggttcttccggacattcttgaaagaaggcggctgggataagggggatggtcattattgggatgattttttccatagaaagggtcgaaaggtcttttcattggagaattgttacgatgaccccttgtcctcatacttagttatgctgaagtccgctgggaaattctctctagatctgaactttccggttcgatcggtaccccaaaccattacttatcatgagaagtgggttaccgaggttttttcccccatgtttctgcaggtgatggcaagatttttctctcgtctgcaagattgggttgttgttccggctggtccgatggctgacttctcccgtgtttggcctagctttgaggggaagtgtttaacagaaattgatctgagtaaatttgataaatctcaaggtaagctgttgcatgatgtgcagagggagattttcctccgtctgggtttcccacccatttggtgtgattggtggtttaaattccacgagtcttcctatttaaatgataagaaccttggtatagctttctcagtagattaccaacgtagaacaggcaatactgccacttactttgggaacacgttggtaacaatgattatgatggccgaagtgtatgaacttgattctctccctttctgtggtttgttttcgggtgatgacaacttgatcgtgactgatcgacctcttgaaggtcgagtttcgttattcccgaacatgttcaacatggaggccaaggtgatgcgtccgggtcagaattacatgtgtagcaaatacctttgcactgtagacggtcgcgtaacccctgtccctgatccttttaagttgctgaagaaagctggtgcctcgtgtcctttggagcaccttgatgacttttacgaatcgtttctggattataccaaatacctggtgagggatgaagttagaacattaatacccaggttgatggcccacaggtatcaagtctcgatggatgaagctggagttgctcttgatcagattatgagctggcgaaagtcaaagactcaattctttaagcatttccagtacaggaaaccaatcaaggactcgctcgaggctgtgaaatccgacttcctttctgctttcggaaaagtagatgatcgaataagagtttggcgcgggcgtcgaaccaatcataagaaggaggtcgatgctttaaaggtcccattggtgagttttagggagtgatggtggctcgcctagagcggtgtgctggtttctacctaaggaaccaggagagtggagtgacttggtcatgacaagtcgagtagtactttaactacgagtcgtcgttgagacgccggtccccttccaaggggatcgagagggttttcccggtactttacccgggattcgaattgagctgtctttgacagagctcaaactcctcgctagatactctaacgagtgtcttgaggactctcctatggagagtcagtaaagacc

SEQ ID NO: 499 - DNA, 7531 bp, Citrus yellow vein clearing virus
  source 1..7531: mol_type = other DNA
gaaaagcaaacattatcatacacaccccaaaaattgtgatcatcgtctctgcatcaacagctcagctaagaaccagagaaatggccactattaggggtgccatcgaacgcattacagacaccaccgtacgcactacacttcaagaggaggcatgccgccaaatacgcgctgaacttaaaaacgtcgaacacatcaaccgttacgctatacagcctgacgccgccgacgcactcgaacacctaggcattggttctaaccccttctctgtggcactgcacacacacggtgcctgcaaagcgattgagaaccaattactctatgtagttggtaccttactcccaaaagaacgtgtcaccatgctcttccttaagaaaagcaagctcaacatcatgaaacgctgccctaaattccaagacatcttcctgaaccaacatattgaaccacgcgacgtttctaggtactgcgactttaacgtccaatccacctccaccagcatacccacacgaacggcttacatcagtgacacactccactttatggaccgtagagacctagtccgactattcctaaacagcccaaatctagagactctctacgccaccattgttctcccagtcgaggctgcttacaaacaaccgagccgctacccagagatataccagattaactatgacttcgacggtttccagtacatacctggaggccatgggggcggcgcctaccaccacgagttcgaacagctgcaatggttagacactggccatatccactggcgtgggcccgactgtaaagagattcgcatgacaattaccgcccaaatgctcgaaagcttaggtgcgaatcatcttttctgcttcaaacgtgggaaactactcaccccacgtgtacgcactttcggccgagatacccaagtgctcttgcccaaaatcttccgcccggccgacaaaaactttaacagggcaataccactaaccctagctaacaaactactcctgtacgctaaatccattaacacagtgaccttccgcgacgtcgttgccaagacacgccaacttatgaaggacaaggagcttgaaacatacaccggcaacgacctgttgcatatggccaactatttcttcgctgttggagcactgtcaggagttaactcctatgaccaattgcttggcctatccgcctgggaagcctgcaccgtccgtatcaagaacaccataacaaatctctgggaaaagattgccggaaagaaagagttcggcaagctattggaggcccttgagtgggaaacattcacatactcacgtcaagtgaccgaattcaccgttacgggactgcccgccctgctccccctcccagacatctcagaccaagaagagattttcgcccagcaggacgagttagacaaaatcactgccggcgctaccaagatacggactattgacattatgcggggacaagctaaccgcgctaacccaaaaactccgatcaactcaacaccggcccagggaccccaactgcccgatacccccgacccaatcgaccaagctgcctccaaagacctcgtcaccaagcttcagaaaaacaaacgcatttacatccaagacgacgggccggaataccttatgggacacatggctgaagtccctgcctggtatcttgaacaagatgataccaccactagactcaaaaaccgctgcgcttggttcttcggcccacccacctacagatatgggcacaacgacattgagtacaccaccatagaatactacccttgggtcgagcgtattggagccattttcggcaagtacaacacctgtcttgctcaaacttacgacgccggagcccgtattggataccacgctgacgacgaagactgctacgaccccgacgtcaccgtggtcaccatcaacctcactgggaacgccaccttcctgctcaagaccccaaccggcactaggacctggaaacttaaacctggtgacttcattatcatgaaacccggtgcccaaaggtgcacaaaacatgccattagagattgcacaactaaccgcacatccttaaccttcagatggcaggcccgcacttgccccactaacctcagaaagatcactaacctacccaaagccaccaaccaaccccaaaccactgaatggcgtcctgtaactaaaccacgccctagcaccaccgcttccagcgacacccagaccccacttgtcatagaccaggaacgagggtataccaccacctccgacgtgacaccaacgattaggctgcccgccgaaaatggtaataacaccggtgctggaccctcctccgcattaaccctcgccgacctgaatgataaccaagcgccgaccactaacaaaggaaaagagaaacttgaggaaatggtcgaaactggcccaactatcatggaacgcttcctcaacaccgttcaggaaccaacacaagatttatgggactccgcctctgaatccgccgcgagctacctcgctgaaggcctcggcatctctgccatccaagcactcccttgggcacctcacttggaactcatcaatgcattaggcttccagggcactgaaaggcaatacggcccagacaactgtctcatatggcctatcacgcattacagagaattgcccagaagcaacaatgtcgaagcccctccggaagtgcttgagctgctcgactgcatcaatagataccccactgacgtcccaatgctcaaaactcgagccgccgccttcggttcagacgtcaagaatctacgcataggggcacttgttaagaaccaggacaaacagtggcgcgcatcactcgcactactttgtgaggaaaatgaacacctcctccctaccactgtaatacacggcgctggtggctccgggaaatcccacttactccaacagtgggtggcgtctactgagcgcggaaatgtagtcaccatcttgcccactatcgaactccttcgagactggcaaaacaaatgtccacatgcaccgaaagagactttcaaaaccttcgagaaagcgctcatccagaacagcgcccccgtggttatcatggacgactactctaaacttcccccagggtatattgaagcctacgtcagcctcaagggccagtgcaaacttctcatactcactggagatcctagacagagccactaccatgaggagaaccctgaggccttaatctctactcttgaccccgccacggactactttggcaaattttgcgcatacaacatcaacgccactcatagaaatgccaaaaccttcgccaatgcgcttggggtgtactctgaaaaagaaatccccaccaccatcacctgctcatcctaccagaaaagcggttggccaacacttgtcccatccatccttaaaagaactgcgctcaacgacatggggcagcgctcactaacctacgcaggctgtcagggactcaccaccccaaaagtgcagatagttcttgacaacgccacaccactatgctctgacaaggtcatgtacaccgcactatctagagcggtggaccaaattcacttcttcaacactggcccaaatcacactgattactgggaaaagatgaacgccacacctttcctcaaaactttcatcgaccacacacgtgaggagaccttcgctgagcaccaacctgccgaacccacagtgcgtgagtacgcaccagcaacgcatttcccaccggctaacgagaacctagcactagagccgtgggtcgaaccgctgactgataaacactcgcgggaactcttccactctgccttaggccacagcaactgcgtccagactgaaaacaccgtagtccaactttttccccaccaacaggccaaagacgaaacgctcttctggaaaacaatagatgccagaatcaagataaccaccccagaagagaacatcagggcttgcagcatagccactgacattggcgacatcttgttcctaaattacaaagaagccatgggtttaccacaagaccccatacccttcgaacaggcactctgggactcttgtcaagccgaggtgcaactaacctacctcagcaagcctctggctgcactcgcaaatgccgcccaaagacaagaccccgactttgactccaacaaaatccaactcttcctgaaatcacaatgggtcaagaaagtcgagaagatgggctgccttaggatcaaacccggccaaactattgcttccttcatgcaacagactgtcatgctatacggaactatggctcggtacatgcgccgcatccgcacctcactttgcccacccgaaattatgatcaactgcgagaccaacccaaaccaaatcggaacatgggtgcgtgagtattggaacttcaacacccagagccatgagaatgactttgaagcgttcgaccaatcccaagacgccaacatgttacaattcgagctcattaaggccaaataccactcaatccccgaggagatcatcgccgggtatcgacacctgaaatgcaacgcccacatcttccttgggactatatcgatcatgaggttgtctggtgaagggccgacctttgacgccaacacagagtgctccattgcatacaaccacacaaggtactttgtgccgaaaggcaccgcccagctctacgccggagacgactctgcatgcgcgtcgcccctctctgaaaaacccagcttccaacatatctcaccagagctcagcctcaagtctaaggccaagattagaacccaacagaaaggagactttgcgaccttctgtggctggctcatcactccaaaaggcctgatcaaaaaccccacccagctttacgcctcctggttattggctaagcacaacaaagatctcgcggacgtggccagaaactatgccttggacttacgcattgcctatcaacttaaagacgagctctatgagttattatcacctgaagaacttgaccaccaccaactgctcgtccgagagatgatcaagcacaaaatgggccatctcctcaacctccctgaggggtttaaaacaaactaactcgaaatggacttacctgagctcctgctatccaaaaacttcattcgcacccggttacccctcgccaaacccattgtcatacacgctgttgccggcgccggcaagacacaacttcttgaagaattcgcgcggtcctcaccctcaaccaaaatctactcacctgtgaaacatcactccaactcactgctgctctcgcccttccacaaagctctctctgaagcttccattgtcgacgagtaccctctaagccagatacacgagaacgtcgagtacatctttgctgaccccatccaataccttggtaatccaaaccttagaaaaccccactacatctgcgcgtcttcccatcgatttggccattccaccgccgctctcctaacaaaacttggcattgaaacttacgcacataaagaagataccgtccgggtagacaatatcttccaggctgaaccagacggccaaatcatcgcctgcgaccgacccactcaagagctggctgccaaacacacactagactacctgaggccctgcgaaagcataggactaactttcccacgaaccacgatcctgatctctcacgaacttactgcagacaccctcaccaaagagatttacatcggtttgacccgccactctaaccaccttctcatactcactccggatgcctctacaacctcctcctgaccacacttgggctttccgactactagctcttggcgccgccttagcactgctcactttcacgctcaaccgagacacaagtcgtcacgtcggagatccttctcactcacttccttttggagggtactacagagacggcagcaaagtagtccattataactccccgagagccacaaaacctagcaccccttccttcctgtacctggccccaatcttactgatcctactaattcatgcagtcaatagatttactaatcctcgccattcttgttcttgcactcattgccagcctattccccgcacctgaaccttgcacaattgtagtctctggcgcctcagcctccgtaactaactgcccaaaccccgaacaacttgcagagctagtcagagcgcttaaaccggctaaaccggtttaaaacttaacacaaactcgaactcatgagcttcgactacactcaccctctctaccgcagctatccatttccacactactgcgagttcgaccggcaccaactctgcgaccatcatccagtactcaaacctccaactcacaaacccagcgccccgaactctctcatgtctaccaacgacaacaagggcaaagaaccacttcacccgacaccttcgggccctaacgacacgaccccgaaacctatccccgtacccactccctcagttacgcccacagctgcaggtaaggaaaaccaagaacccatcgaaaagcgtatcacacacgctttccacgctgaagcaaaaacccacaacaatggggtctctccacctgcctttaacccgaacaacatgaatgctgtgccgctgaacctgctcaacctcaacctaagatactcaccggtcactaactccatagctaaccctaaacagactgaggctatcgggaaagcttgggtccgcatcttgaacatcgatcctgccaacgtgttcttatacgccatcgacctcgccagagcttgcgccgacgcgggctcttcccctgaagctgatattattggagcgaacgaagatctcaaccccgttgttgaacgaaacgcattggccctagtggttagggatttctgcccgctgcgcgctttttgcgcttactactctcgggtggtatggaacctcatgatcaaggcggaccagcctccggccaactggatgaaatccggggtagacgagaacgcgaaattcgcggcattcgacttcttccatggtatcctctcgcccgcttccctgtatgtgcccctagagagacaccctacttccgcggagaggatcgcaaatcaggccatgttcgctgtgaaaattgccaacgctccaggaaatggcacggacctcacgatggaccacgttgccttcaccaaaggaaggactacccagcactccggcctccgcccgacccctttcaacatctaaccacctttgaaccaatactcctagcatgcctacaagcccttaaaccacttccccccgaaatccaaatagctatcatttcgtgtgtgtgtgacttctttaatttcttacgctgtgccagtagcaagtaccagggcaccagccgctcagctgttaaacgtcgagcggcccgcctgaactactgctacaagtgtgggcaccccttatatctaaataaacctcacccctgccgaccaggtcaattgtgctctgcatctatctccgagcgcctctgtttgctccacacaggaccgattaggtttctaaccgaaaatcctgttagtgccagagcagctcacttcctagcgcacgagctccttgaccccagatgaaacataaatattcaggctttcagtttccattttctg

SEQ ID NO: 500 - DNA, 7890 bp, Potato latent virus
  source 1..7890: mol_type = other DNA
tcggataaaccaaaccaacaatatttacacatactcaagttaaacatacactgttcaatcttgcgtacgttattatggctttgacttacagaagtccattggaagatattgttggtgcatttgaaccaagtgttcaaacagctattgcgaacacagctgctaaccactacaagcagcttgaggaagagaagggaatcttatttaattatgcattgccacctgaggccaaacagaggttaataggcgctggcatatatttaagtcccttttccgctgttccacattcgcatcctgtgtgtaaaattttagaaaatcatctgttgtatgtagagcttcctagtagactagataattcttttatgtttgtaggtattaaaaactttaagttggatctgctcaagcgcagacatgcaaatctaagcatgatccaaactatcaatagatatgtttgtagtttagataaaataaggtacggttcaaatttcgtagttagatctagcgctagttatccagagctttgcagacgcaaaggtgagcttgacggagcagtgttgagggaattggtgcctgagttgatgattaaaagcgctaagaatctattcttgcacgatgagcttcattattggacccatcgggatctgattaccttcttggaggtactgaagccagacaaactgttgggcaccttagtttacccacctgaattgctaaagggtgcgaagaaaagtttgaactcttggtgctacacatatagagtggacaaagacaaattgtttttttatccagatggcgtccattctgaaggctacgagcaaccattgagtggcggttacctcctcgaaacaagtaggattaccacacgtgatggtgaagtttattgcgtcgatgttgtgtgcagtaaattcgcgcatcatttgattgcaataacccgtggtgatctgattgtacccacacaacgcagttttgctccctttgaggccataactagtaaaggtttgaataacttggtgaggggcaaggtggaatgtttccccgtatgcgcaagtgtagtgtctaaattgtataggtatttgcgcacactcaaaaaacccgatgagcaatcagcaatggccaaattgagccaacttcaggcaaatcccactggggaagagatacatttcatccagggctttgccaaattggtgataaatacaaacaaaatcgacagtttaatcaactgcgatagtattaaggtgttcatgggcaaattgtttggtccgttgcccaattggcttaccaagagattgaggagcgtgcaagaggtgtctctcgatgaatttgtccattactttgaaccatatgtcgtcaacgtgcccactaagcatgtgaactatggttttgagttcaattacgtaatggaagatttcaggtacgagcagggtgagaatgatctagtggatatgctagacaattttgatggctccacaaagatgagcacaagcctttgcatgatgaccccatacgtcggcttagcaccattgaccacgcgacgcaaattcctatgccatatcgaggagaattccatattcagagtggtgtctaggaacatcttttgtagctacacaaatagttacaaagtggccgtgagcactgagggggtggttcggatacttgagatttatagcaaagtgtctgtggatctactgggagcgtatttgggaaaattgctcaagaaaacagagttcatagagagagtgcgatcaagggttaaggcaattgccataaagcacctcaagtacacttggcaacaggttggtctagcttggttcaccagtggaaggcgtggctacacaaaatacattgattgcagcccatacacgatgaataccttcaaagagcttaaagagagatggggtgtgattgtgcgtgaattgtctaaacagcaggacaacgctgaagctgcgaaaaacatacctgagcaggaaattcaaacgaccagcaaaccaagttgtgtggagaagcgaaattacttctcgaacactttgatgactagctttgctgcgtcaggagtgaaaggcaaggaacaggtgagctccgaaattgccaagggtaggggtgaaaggagcgaattgagggcaactaaattgatgggctcatgcagcaccctcggcaaagtggctcacatagcatcaagaaaaggctccatgggggtattggaatgtgtagcgagggtcatcaaattggatttccaaaccgccttgaagttccttagagtcaagggtgtgtggatgcaggagtatgagagcataggcgagttggaggaggagcagatacagagtcctgcatatgatttttgtgctgcgatcgcaatgaccttcaatgttgaaattgaattgacgttcccaggctcagagcttgtttaccacttcgctgcaagttcaactgtgagttgtatccgcttgagcatttgggaaggcgtagtcacactgatgagggctgaaaatgattgcgttatcactgcatgtgcacaagctttagctagggagcctgaggatgtagtgaaggtgctcaaagatagattggaggagagcatactggaagagatttggaacggcgaaggggtgcctttcgagagaatgtatctcttctttgaagctctggatattcaagcacattgcaatcgcgatggtgcacagctagtgttgaatggcgggggcaagctggcgcgatgtttcgtgattaaagaagatcacatcgagttcgcaggtgagaaaaaggtcagtagagtacttgagctccaggatgctagaacaagtagtaaagcagacccagaattggtcaaggagtttcagaaagccgggactgtggtagaatatgtagcagtgcaatccagagcgcaagtcctggcgaagagtctagtggatgcaaccactggggtgtgcagctcaaccatattcaatgactgtgagagcttggaacgttcctttagattcaccgaaagcgaactagcgcgaaatgtttgttgtgttatcggtacgtttggggctgggaagagtaccctgttcaaggatatgatgaggcagtgcctagggaaaggtgttcactacgcatcacctaggaaggtgttggcgaatgagctcaaagctagtttgggtttggcaaaagggaagcggaatcgaaaagtagggacagagaattggaatgtgcacaccttcgaaagtttcctaaagaaggcgaaaaatgttgcagagggtgagttggtgatcattgatgagatccagttgtacccgcctggctacctggatcttctactttacctcatacctgagttcactagcgtcttcgcggtcggtgatccatgccaaagtgattatgacaacgagaaggataggcatgtcttcttaggggttgagacagatgtctgtaggcttctgagcggccgtgagtacgaatttaatgtactttcccgcagattccacaacttaggctttgaaagcagattgccctgcagattcaaattcccggctggagcagtcaaggaagagtatttgttcgttaattcaatgactgaggctaatgagttggacagcgcctacaaaagtgtgtaccttgtgtcatcccacttggagaagaaaatagtggagtaccagagtgacgttaaaacgccgaatgtgctgacgtttggtgagtcgactggttgcaccttcaagtatggttgcattctcatcacgcaagtgagtagcgcatgtagtgagcgcaggtggatcactgctctatcgagattttctcacaatctctgtttcatcaatgcaactggtgtgcccatagaaaatgtggcgaagagttacaaagacagaagtttgggaaaattcctgtgtggaactgctgttgagggtgatataaaatcaatggcttatgggaccccaatcttcaaagagcagttcatcgccggcgttgggcgcgatgaaggtgtcaaggaggataaagtcaccggtgatccttggttgaaaaccatgttggatttgatgcagctcccagatgttgaggaagcagagatgatgcaggaagagatgcaagaagagtggttcaaaacccatttgccacaagaggaaatagaaggggtcagatgccgctggattcacaaaatgctagctaaagaagcgagggaatgtagaatgggatcgatcgtttcagaccaattcccagatgatcatagcaagcaagaggggaagcaaatcactaatgcagctgagcgttttgaagctatatacccaagacatcgggcaaacgacacagtcacattcattatggctgtgaagaaaaggctgagattttccaggccttctgttgagaaagcgaagctcacgcaggctgaatgttatggaacttacctgctcaaaaacttcttggatgtgatcaagctcaagcccgcacatgatgaggcaatgatgatcagagcgaaggaagattttgagcagaagaaggtgagtaagagtgctgcaaccatagagaatcacagtgggaggtcatgcagagattggtgcatagatatagggcagatcttttcgaaaagtcagatatgcaccaaatgggacaacagaatgcgggtagctaaagcagcacaaacgattgtttgctttcaacatgccgtcttgtgccgctttgctccctacatgaggtacattgaaatgaagctgaaagaagtgctgccggctcggttttacattcatagtggcaaaggtttagatgagctcaactcttgggttaaagaaggtaggtttgagggagtgtgcactgagtccgattatgaggcttttgacgcttcgcaggaccagtacatcgtcgcttttgagttggcactgatgaggtaccttaggcttccaaatgacctgattgaggattacaagtacataaagactcacttgggttccaagctggggaattttgcaatcatgcgcttctctggtgaggccagcacttttctattcaacacaatggcaaacatgctcttcaccttcatgcggtatgagcttcatggcgatgagtacatttgctttgctggtgatgacatgtgttcatcaaagagattgcgaatcaagaaaacacatgaaagctttcttggaaagctgaagttgaaggctaaggtgcaacacactgagaagcccacattttgtggctggaatttatgtgctgatggaatatacaagaagccacagctggtctttgagagaatgtgcattgccaaagagctcaacaacctgcacaactgcatcgataattacgcaatcgaagtggctttcgcttacaaacttggggagctggctgttaacaggatggatgaagaggaattgggggccttttacaattgcgttaggctcataacaaaattcaggcatctgctcaaatccaatgtagtggaggtctttaagcgtaaatagttgttactttagcttaggttagctactatagatttgatatatggatgtgcttgtgaataaagctttagagtttggtttcaaaagattgagttccgtgctgaagagtccgattgtgtttcatagtgtgccgggtgccgggaaaacgaccttgataagagcgctgcttaactcagacagcagattcgagggttggacgctggccgagggagacaagcctaaccttgaaggagtggtaatcaggaaatacgttggtggagaagttggtccctttgctctattggacgaatattgcgtggaaccggaaattgccggtaaactttacgctgtattcggagatccgctgcaggtgaacaacattggtttcctaagagcaagctggattaaagtggaaactcaccgcttcgggaaagccaccgcgcaattgctaaatcaattcggttttgaagtcagttcaagcaaggcggacattttggtcattgctgatatttttgtgggtgaacctgagggaacagtggtgtattttgaagaagaggttgggtgcttactaaagcgacatagcttggaggccgtgcacattgatcttgtgaggggcgatagttttcctgtagttacatttgtcacatcggaaaattgcatgatattggataaggtgcgcagtttcaattgcttaacgagacattctgagaagttgatcatcttgtgcccaaatgccacttactcccccacctgattacaccaaagcaattttggccgcttgtatcggtttgtcattggctttgctcgtcggagtttactctcgtagcaccatacctgccgtgggagacaatttgcattcattgccgcacggcggaacatacctggacggcacaaagcgaatagtttacggcgctccaaataagctgaattctctggagggccaacgaactttatcaggtcaaccttgggccattgttatcgtgctgatagcggtaatcatattgttgagtcgattcaactccacttgcgcacactgcggtagatgtcattgaccgcaatttatttagccattggtctgctagtcttcagcgtgtctgtgtatttaattcagccaaatctgcaggattcgtgctcgatcgtgattactggggaaagtgtgcgaattctcaattgcagggtgactgaggccctacttcgatttgcactggaggcagagcccaagagcgtgaagatcccttaggtttactgggtttgatttgaatatggatcagaaaggaaaacaaagtgagagttcaagtcaagctgtggcccctgttccaaaaccaccgctgccccctccgatcaggggcgaagaggcggttaatgaaggcaatgaggaggcgaagatggagcgacgcctagctctcttgcatcagcgcttgaagggtgagcggaatggcacacgcattaccaatccgagctttgaaataggaaggcccagtctgacgaggcctgatgatatgaggagggatcccgccaacatattcagtaggttgtccatcgatgatctggcgcagatcaagccaacacctgtgtccaacaacatggctaactcggaggaaatggtcaagatcgctgtcgctgtggaagggctgggtgtacccactgaacaagttgcaaatgttgtactgcaggcggtgatttactgtgctagtgcaagtagctccgtgtatctggatccacatggtacaattgagtacacagggggagcagttgttcgtgattctgttgtagccatcatcaaaagggatgccgggttgaggagggtgtgtcggctttttgcgccgttggtctggaatcacatgttggtgcacaactcacctccctctgattgggctgctatgggcttccaatggaatgacagatttgcagccttcgactttttcgactatgttgaaaatgaagctgcgatacagccgttggatgggttgattcggaggcccacaaggtctgaaaagattgcgcacaacacacacaagcgacttgcactagacaaatcgaatagggatgaagtgttcgcaagtttggaaaccgaaatcacaggtgggaaaagaggaccagaaatcagcaggaatttccgaaatgcagccaattagccactatgaagccaagctcctagccgtgtctttagctatgtataagtttacgggacgttgtgagcccgctgttgctttaaatattgttaataaagcttgtaatgttggtatgggcaagagcagcttcgcgcgcaggcgtagggcggctctcctggggcgttgtcatagatgctttagaacttccatggccacacgttgcaatggtgtgacttgttatccgggcattggagctaagccaaaaatcgagatgttcatcaaatacggtgtaagtgagctgaaaccgtaattgagttgtgcataaaacctaattaattttaagtgtgcaactataaaataaataaagttttaaatatttttccttt

SEQ ID NO: 501 - DNA, 6495 bp, Apple stem grooving virus
  source 1..6495: mol_type = other DNA
aaatttaacaggcttaatttccgcgctttacgtcaatggctttcacttacagaaaccccctcgaaattgcaatcaacaaacttcctagtaagcagtctgatcaactgctttccttgaccaccgacgagattgaaaagaccttagaagtgaccaaccgcttcttctctttttcaatcacaccagaagatcaagaattgttgactaagcatggtctaacacttgcacctatagggtttaagtcacactcccatccaatatccaaaatgatagaaaatcatctcctgtatatatgtgttccgagtcttttatcctcctttaagtcagttgcctttttttcacttagggaaaataaagtagacagttttcttaagatgcattcagtcttttcccatggaaaaattaaatctttggggatgtacaatgctataattgatgggaaagataaatataggtatggtgatgtagagttttcatcttttagggatagagtgattggtcttagagatcaatgccttacacgtaacaaatttccaaaagttctgtttcttcacgacgagttgcactttctaagtccatttgacatggctttcctatttgagacaatcccagaaattgatagagttgttgcaaccacagtttttccaatagaacttttattcggggacaaggtctctaaggaacccagggtttatacctacaaggtccatggctcttcattttcattttatccggatggtgttgcctctgagtgttacgaacagaatttggcaaattctaaatggcccttcacctgcagcggcatacaatgggctaacaggaaaattagggtaaccaagctacagagtctcttcgcccatcatgttttctcatttgacagggggagggcttgtaatgaatttaatcatttcgacaaacctagctgtctacttgcggaagaaatgcgccttttgaccaaaaggtttgataaagcagttattaacagaagcacagtctcttccctcagtacatacatggcttgtcttaaaactgcaaatgcggcttcagctgttgccaagctgaggcagttggagaagagggatctttacccagatgagttgaacttcgtctattcctttggagagcatttcaaaaattttgggatgagagatgactttgatgtgtcagttctacaatgggtcaaagacaaattttgccaggtcatgcctcacttcatcgccgccagtttctttgaaccaacagaatttcatttaaacatgcgcaaattgttgaatgatctggctactaaaggaatagaggttcccctttctgtgatcatcctggacaaagtcaacttcatagagaccagatttcatgccaggatgttcgacatagcacaggcaatcggggtgaacctagatttactggggaaaagatttgattatgaggctgagagtgaagagtacttttcagagaacggttacatctttatgccctctaaatcaaatccagagagaaattggattctaaattccggttcgctgaaaattgactattcaagattggtaagagccaggagatttagattgagaagagatttcctagatcccatatctaaaggaaaatcccctagaaaacaactcttcttggagtcaacgggaaacattaaatcaaatcccaatgctgaaaaaaatagcgagagcggcgaaataaagattgaaggcagtgccgaaaatgatcagccacatgaggtatcacatacttcaatggaaaccgaggatggacagggttttgaaggttcaataccagttgatttaatcaattgctttgaaccagaagaaatcaagcttccaaagagaagaaggaaaaatgattgcgtcttcaaggccatctctgcacacttggggattgactctcaagatttgttgaattttttggtaaatgaagacatatcagatgaattacttgattgcattgaagaggacaaaggactgtcacatgaaatgattgaagaagttttgatcacaaagggtctttcaatggtttatacttctgacttcaaagaaatggcagttcttaatagaaagtatggagtgaatggcaagatgtactgcacaattaaaggcaatcactgcgagctgagttccaaagagtgcttcatcagattattgaaagaaggtggtgaagcgcagatgtcaaatgaaaatctaaatgctgattccttgttcgaccttggaagatttgtgcataatagagacagggctgtcaagctagcaaaatcaatggcaagaggcacaacaggcctcctgaatgaattcgacctagaattctgcaagaacatggtgaccctttcggagttgtttcctgaaaacttttcttctgttgtcgggctaaggcttgggtttgcgggttctggtaaaacgcataaggtgcttcaatggattaattacactccaagtgtcaaaagaatgtttataagtccaaggagaatgctggcggatgaagttgaacctcaactcaagggaacggcctgtcaggtgcatacatgggagactgcacttaaaaaaatcgacggaacttttatggaagtttttgttgatgaaataggtttgtacccacctggataccttacactgctacagatgtgtgctttcagaaagattgttaagggacaaagtgaaaatttcttgaaaggcaaactgttggaattgtcaaagacttgcttaaacataagatgttttggtgatccattgcaattaaggtattactcagctgaagacaccaatctattggacaaaacacatgatattgacctcatgatcaagacgatcaagcacaaatatcttttccaagggtacaggttcggtcagtggtttcaagaactggtgaacatgcccactagagtggatgagtcgaaattctcaaggaagttctttgcagacatttcaagtgtaaaaactgaagattacggactcatcctagttgccaagagagaagataaaggtgtcttcgctggaagagttcctgtagcaacagtgagtgaatctcagggaatgaccattagcaaaagggtgttgatatgtttggaccaaaatctttttgccgggggagccaatgcagccattgttgcaataacaagatcaaaggtcggctttgactttatccttaaagggaattcattgaaagaggtacagaggatggcacaaaagacaatttggcagttcatcattgaagggaagtctattccgatggagaggatagtgaacatgaatcctggagccagcttttatgagagtcctttggatgttggaaattcatcaattcaagacaaagcttctaatgacctgttcataatgccttttataaatttggctgaggaagaagttgacccagaggaagttgttggggacgtaattcaacctgttgagtggttcaaatgtcatgtgcctgtcttcgacacagatccgacgcttgcggagatttttgataaggttgcagcaaaagaaaaaagggaattccagtctgtgctgggtctttcaaatcaatttcttgacatggaaaagaatggatgcaaaatagacatcttgccctttgcgcgacaaaatgtttttccacatcatcaagcgtctgatgatgttactttctgggcaggtgttcaaaaaagaattagaaagtcgaactggagaagggagaaatcgaagtttgaggaatttgaaagccaagggaaagaacttcttcaagaattcatctcaatgctaccgtttgaattcaaagtgaatatcaaggagattgaagatggagagaagagctttttagaaaaaagaaagctaaaatctgagaaaatgtgggcaaatcattcggagagatcagacattgactggaaacttgaccacgcctttctcttcatgaaatcacaatattgcacgaaggaagggaagatgttcaccgaagctaaagctggccaaactttggcctgtttccaacatatagtcctatttagatttggacccatgttgagagcaattgaaagtgcctttttgagaagctgtggagactcatactacatacactccgggaaaaacttcttctgcctggatagctttgtgacaaagaatgcaagtgtctttgatggattttcaattgagtcagactacacggcctttgactcatctcaggaccacgtcatattggcctttgaaatggcactgttacaatacctgggcgtgtcaaaggagtttcagctagattaccttagactgaaattaactctcggatgccgtctcggatcactagcaataatgaggttcacaggagaattttgcactttcttattcaacacatttgccaatatgctgtttactcaattgaagtacaagatagacccaaggaggcataggattttatttgctggggacgatatgtgttccttgagctctctcaaaagaaggagaggggagagagcgacaagattgatgaagagcttttccctaactgcagtagaagaggtgagaaaattcccaatgttttgtggatggtacttaagtccatatggtatcattaaatctccaaaattgctgtgggccaggatcaagatgatgagtgagagacagcttttgaaggaatgtgttgataattacctatttgaggcgatatttgcctacagattaggtgagaggctttacacaattttgaaagaagaggattttgaataccattatcttgtcataagattttttgttagaaattcaaaattgttaacagggttgagcaaaagcttgatatttgaaattggggagggcatcgggtccaaatggctatcgtcaacgtcaaccgcttcctcaaggaggtcgaatctacagacctcaaaattgatgctatctcgtcctcagagctttacaaggatgcaacctttttcaaaccagacgtgcttaattgcatcaaaaggtttgaatcaaacgtcaaggtttcctctcgatctggtgacggcctcgtcctgtctgatttcaaactgcttgatgacaccgaaattgattcaatcaggaagaaaagcaacaagtacaaatacttacactatggagtcatcctggttgggatcaaagcaatgttgccaaactttagaggcatggaagggagagtcattgtatatgatggagcctgcctggatccgaaaagaggccacatttgctcgtatcttttcaagtttgagtctgactgttgctactttggtctcaggccagagcactgtttgtctaccacagacgcaaatttggccaaaaggtttagatttcgtgtggactttgattgtccacaatatgaacaggacactgagttgtttgctcttgacattggagttgcatacagatgcgtcaactctgcaaggtttttggaaaccaaaactggcgattcaggatgggcttcacaggcaatcagcggctgtgaagcacttaaattcaatgaggaaatcaagatggccatcctggatcgcagatccccgctgtttctggaagaaggtgcaccaaacgtgcacattgaaaagagattgttcagaggtgacaaggttagaaggtcacgctcaatttccgctaaaagggggccaaactcaagggtgcaagaaaagagaggatttaggtccctctcggctagaattgaaagatttggaaaaaatgagtttggaagacgtgcttcagcaagcgaggcgccaccgggtaggagtatatctatggaagactcacatagacccggcaaaggaacttctgacggttcctccccctgaaggatttaaggaaggtgaaagctttgagggcaaagagctttaccttcttctttgcaaccattactgtaaatacttgttcggtaatattgctgtctttgggtcatctgataagacccagtttcccgctgttggatttgatacacctccggttcattataatttgacaacgaccccaaaggaaggggagactgacgaaggaaggaaggccagagcgggttcgtctggcgaaaaaacaaaaatttggaggatcgatttgtcaaatgttgttcctgaattgaaaacctttgctgccacttccaggcagaactctttgaacgaatgtacgttcagaaagctttgcgagccatttgccgatttggctcgagaatttctacatgaaaggtggtctaagggattggccaccaatatttacaagaaatggcccaaagctttcgaaaaaagtccatgggtggcctttgattttgccactggtctgaaaatgaatcgtctaacacctgatgagaaacaggtgattgatagaatgaccaaaagactttttcgtactgaaggacaaaaaggggttttcgaggcaggttcggaaagtaacctggaactggagggttaggagtcgtgtgaaattccgcaaacttggtcgcggtcttgcaggttgacatgcctgcctttatacttaattaaagggttcccccggttttctgagcatttccgggttagtgtggtttttctagagtctagagtttgtccactct

SEQ ID NO: 502 - DNA, 8747 bp, Citrus leaf blotch virus
  source 1..8747: mol_type = other DNA
gaaaagcaacgaaagcaacctacacaacccaaaattaatatattgcaataactgttatcactcaatataagccatggctttgatgagcaacaaaactgcaattgaatctattttgggtaactttgaaaagaaacacgtcgatgcaatctacaatgccgccgcacaaactatcctctctcactctgaatttaggaataagcattttgcttattcactcaattcttatcaaaagaagatagcctcaaaggtgggtattgaattgtatccaaatggttatttaccacattcccatccattgtcaaaaatttttgagaaccatttgctttttgatgtacttcctggcgtagtaaatactagtagattagttatgtgtagcataaaggagtccaaagttctggtttttaaagggattcgcgacaaatccagaagacaggtttcagacctcaatgccctcaattccttaaataatagtcatacatcattcattaataggttagttgcatccaaagatgtgagtagatatacggaagaagctgatgctttttttcaatccaagaaagggagtccggagctattttcaaggaatttcatcaaaagcttggaaaataaagaggctgttttttttcatgatgaagttcatcactggactaaggcccaaatgttctcatttcttaaaagcacgaaggtcaaaaggttcattttcactgtagtctatccaccagaaattctcaaaaaatttgccaattcccagaacccaaaggtttatgatttcaaagttgataagggtcggctttttttttttccggatggggttaagacagaggcctatgagcagaaattgaatatggagtggctcttttcagcatcacatcttcgcagtggagactgtgtatggactgtaacaagacataagagtatttatgctcatcacctgtttgagatatccattggcgaactagtcacggactcaaaactttttttttccgattataactccattgacatgtctaaaatatttcttgatcgttttcggagttatgaggtattccccatttcgattgagcacctttataaggtctactcttatctgctttgcctcaaaaaacctgacttggagagtggtctagctaaattaaggcaaattattggagatgatgtcgaaatcaaagaattcctcttctttgaacaattttgtaagcgcttaattgaacgccaaacctcttgggggctatttgggcactctttctttgaaaaattaaccgatatggcattgtcatccttgcccaactctatagcccgaatttttcctcaatggaaaaaaaaaaacacatttgagttccttttctcacttgggactcttgttgtggatgtggagagaaaggtgtgttttgaacatgtgcttgaggaatggggatttgaagttgttatcactgatgaaaatgcctatcttgatccactatctatctttgctatcaatgaaaattttaatgaggatagagtggacgatggttatttggaaagaatccgtcttcccttctggaatctgaatgactatgacttgaaaagaaagagggtaaatgcgtataacattctctcttatcgatttgaagaggagcgaaaaattgaatcagcgcaaaaaggtccaaataagatgctccagattgagtggtacgggattaaagaatttaaagttgacccttttatcagcaactccataactgaatttactcttttagaagcattgctgggaaagaggatagatccaaaaaaatactcatattcaaagcaagcctgcactctttccaactatctcacatttttgtgtgctgagggtttggatggattcaatttggaagagcaccttgaacgaaggttgaaagcggccggtcatgacgtttcagatgacgaggaggaagaattgacttcagctgaacaagcggggcctatcaagatattggctgatccacttggttttatgaaagagtgtttggaggagatcccaatcgaaactgaaccatcactggaagaaagagggcagttttccactgattatcattctgagaaatttgaaatcaattacaatgacatttttaatcctcacaattgcatgaacactcacggcgatgaaattcccacaccgtcagatggcaattgttttttttcagcatttactgaaacttttgaagttgaaagacctgacaccttgaggtctgatttctcagactggcttatggaatttaatggggggtcctatgcttcacttgcagaaatgatcagaccgaatggagtttttatggaggcagaactcatatacttgttttgtgtatttagaggagtcacgttgattattcatgatagaactcatgaaaaagagaatgtttatgctgtacaccgcgggtttgaggagggccatatggtacatagaggcaatcattttgtcgggattgaaacttacaatattagtactttaacctcagaccccttacttggtgacatcccatgcggtttttcagaggaaattacaaaattccattttcggcctgatcatttcaactgtgcccagttcagaggaaggaaggcggcttttatcaccaaagttgatgcagattacgggcacaacggtatggtttacccccacaattcatgggtaccttctttagaagagatcattcagatctgtggtcagggagatgatttcaattgtgcattaataaatttctatgaggcaaactcatctcttgggttccatagggataatgaacgggtgtacaatgatgatcctattttgaccgtctgcacattcggtgaaggtagattcaccattgaatttaaggatcaggtaacttcttttctaatgactgctggctctttctttttaatgcctaaagggttccagaagaaggcaagacactctgtctcaaatgaaatgtcgagagtctcgattactttcaggaagcatgttagaaggttgaatgggtcaccgattgccatcagggaagaaaattacaaaaatacatgcctcattaatgccttttcaaaagcaatgaaaaggagcaaacaggcaatcattgcaaaactgaagactgttaatagccctttctggagtagatacctatctgagggtaacggtggctccattgaagattgtcaatcggcctgtgaggcactggatgttactgtcgaccttaatgtaaatggaaaatgtgtggttcttggaaaaggggctttaagaatctcaatggctttaagaaacaaccatttttcagttatcaatgctgcacaactgatggagaggacttttgttagccacttgcttgaaaaaggaaatgtcaatgtgttagaaggatttgacgcaatgctaagtggtgatgtgggcgcagcaggtgttaacaaaattcaatttgcagccaattttgaatttgctagaattttggcaaattcatttctaaatatgacaactggcatctgcctgggcaaggcattggataatggggaaaagtattttctccacattttgaaagatagagtgaaacagattggtatagacgtcacaatggtgtgcggatttgctggatcggggaaaagtcgcaaactgcagtcctggctgcattcaaggaaaaaagggaacttctgtgtggtttccccaagaacaaacttagccgctgactgggcattcaagttagaattagagcccaatgaacagagaaaggtttcaacatttgaaaaattcatcaaaactgataaaagcaaattagatctcatagttattgatgaattgacattgtttccaaatggttacctggatctcctcgtgtatgaattggctgatgtcaataggcattgtcaaatcatccttctgtttgatccattgcaagcaagataccacaacaaaatggatgaatcaatcctgacatttgaacatgacgtggacaggcttattggtggacagaacattgagtacatttacagcacgcatcggatgtccagatacttcaatagattttttgatgtaccttgcttcaatcaggctgatagaacagaggaacaaaggttgtggatatttgatgacgtttactccataccatccatttgctccgaccgtcaggaaccatgtgatgttcttttggttgaatctgaccttgaaaagaaggcattttcacccatcataaatgttatgacatttggtgaatcccagggactcacatttaatcatgtttgtattttgctgtcagagtccagtgcagcttcaaacgaatttagatggatggtggcgctgacgagagcaaggaccaggttttcactctgttcaaccttcttaggtggaattgaagaatttaaagtcaaaaggaaggaaagtctcatcacatccatactccaaggcgagaagatcacattcaacagattaaatctgatgctgaaatgcaatttaattaggagagaaaaagaaaatgggtgcagagatgaggtcgatagggaggaaaggttggagggtgaccctttcctcaaaccatttatcttcttgggacaaagagttgagaaggatgaagatgaggtagaagaagtgaagatcagggaaccaacctgtcaaactcatctgtatataacagagcctaattttggtttgtgctacaatttcgacttcattagggaaaaagaacagcgggaatacagagaggatatgcttgtaactaaccaattctgtgacagttatgataaggttcatataaacggcaaaagagaaacccctggtcccctgcgattcaaagcgatttatccaaagcactcagccgatgatgacatgacgttctggatggccgtcagaaaaaggcttgtatttagagaagaggaggagaattatcaaaggttgtcaagggcgcatttagttgggggtttgctatacaccaacttcaaaaaaaaaatgggcctggaatttacgtttgaccaaggtctactggaggaaagcataaatgcatttgaaaagaaaaagctggaaaaatcatgtggcacaattaaatctcatagcataaggtcggacattgattgggcgctgaatgatgtatttcttttcatgaaaagccagttatgcaccaagtacgaaaaacaatttgttgatgctaaagcgggtcaaactcttgcctgttttcagcacctgattttggtacagttcgctccatggtgtagatacctagaaacccagatcagaaatcagttgcctgaagaaatttacattcactcaaataaaaattttgatgatttgaatgcatgggtcaaaaaatttttccagagggatatctgtgttgagtctgattatgaagcatttgatgcaagccaggatgaatacatattatccttcgagattcatctgatgaaagatgcgcattttccgcagaaaatcattgatgcatacatagaccttaaatgcaaattgggatgcaaattgggccatttttcaataatgagatttacaggggaattttgcaccttcctattcaacacactggccaatatggcattcactatgtgtagatacgaatggaggagaggacaaccaattgcattcgcaggagatgatatgtgtgcattaaacaatttggctgtttgtcatgatttcgatgacctttttgaactcatcagcctaaaagctaaggtggaaaggacagaaaccccaatgttttgtggatggagactaactccatatgggattgtgaaggagcctgaattagtctataatcgctttcaagtggccattgaagagggaaaggtcttggagtgtctggaaaattatgcaatcgaggtttcttatgcctacagtttaagtgagaggctgtatgaagttttgaaaagtgaaaggcaagttcagtatcatcaagctgtggttagatttatagtcacgcacattgacaaactcaaaacaaaagtgagggaccttttcttagaacaatcttccgacgaagatatctgatggcatccctgatcaatgtaagttcacttgtaaatagggtgaagttggatcaaagtataataggtagtgatgaaataaacaaactgtatggttccgatgcaccattggtgttcaaagatgaagttaaaatggttattcctgggaatgctgagggtgaggcaatcaaattgcaagcaaatattctgaccgctgacagattgcagtcaataagaaatgcaaaagtcaatggcaaagaagcggcttatctgcatttgggatttgttccaattgcaattagatctctattaccttctggaaatgaacagatctggggtagatgcgcactggtagatactagcagaactcgagccgaaacagctgttattgatgaatttgaattcaagttcacaaagaaacagccatttgctgcaaaactactaaccatcaacgctgcagtggatattaattgcaaagtgagtgtcggtagcattcaggtgctgctggagctccatggtgttgatctgagggaagaacgttctgtagcagcaatcatcactggcttaacatgcactcccaccaacaaaatggtgttgctgcataagatagagtgcgacacgcccaaatggtctttgtgcaatataatagagcaggttgaggatgaggaagaatccaagaaggcatttgaaaacatgtttaatgcatcttcttccaacttgatcgacttgggtcaagaacagtggctcgacgaaggtaagcgaacacctttgattggcagcttggcaattaaagggtttggacgcaaagtgatgcctgttcgcagacgaaacctcaccacgagaaatctcatgaaggattatgtgtctcatgttaagtcagagacggcttcactgaaaagaagtcaaagtggaagagattggggtaatgatagattgagaaaatatctagaagagcaggctctggagcaggccagatcatcgactgatcatcagttggttaaagcaccaaaatttaaaaccatcgaagtgactggtttggaaactgtgcatgatctaaaagataaaattgacaaggcagagtcttcaactgccagtgacactggaaccaagtgagtataacgtgtgactagtgtaaatagttagtacttatttgaattaatatagatagtgtacatccatgaaaatcaccaatgataatgccgcaactatcaactattggttagccatagttgaaccattcctcacatctgatgaggacagaaattctgatgacatcattcgaaaattcagagctgtagtggccgagcatggagacacagaggaggtggaccctgaggtcttcttcgccattttttccatcttggccacaaagtacggcagagtttattcaaaaaaagttgaagaattgaatgagtcactcaaagctgcaattttggctggggcagaagcagaagatctgagaaacaagttgaaagacatttcccaaagatatgcatcacagcttgagatcacagcagatagagagcagcagcttgaaagtttgaaaaaaaaagggcatgagcaaccactgaccggcagtggatcttctgaaccggtacatgctgaatcagcacacgctccacagttgcatgtggtgaatgatctgcaacaattctacataccattcaatgaatacccaagtctaactcagtcaataggtacttctgacattgcaaatgatgagcacctcaaaagagtgcaacttacgcttaagattacagacacgaaggtcttttcaagaactggatttgaatttgcgataagttgtggatcaagaagtacgtcagacaaggacccatatgatggtataatcaagatcagcggaaaaagtcatatgaggaaagatatagcatatgcaataagaacttcgggaatcactgtgaggcaattctgtgcagcctttgcgaatctatattggaatttcaatttggccagaaatactcctcctgaaaactggaggaagaaggggttcacagagggaacaaagtttgcagcttttgactttttctatgcagtaggtagcaatgcagcaattccaactgaagctgatgggagcgttagactgataaggcctccaacaaatgaagaaaatgaggctaactctgctatgaggtatgctgacatatacgagcaaaattcaaaaacagctggacatgtaacttcaagtccactgtacaatcgtgggagcagttatgagagcaaaaacaaagcaaaactcttagaaatgtagtcccgaattctggcatgggcggatgggtgggccaggactttacactcttaaagtataagtaaggggtaactcagccgcacgggtgaagattgtgcggagcctcatgaatctgaatccaagatgctaaaggggataccgcgatctgaggggtcatgggggttagcctgaagaacagaacactcattaagtatgtggtgacgcaggtcccgacaacccaaaaaggtgagctgaacctgatccaattggagcagtacaggtaaagttatatcctttctataaattgaaaggtagtttggacagatacatgtcattcaattggtgtggaacgttagtccaaatgaaacatttatgcttggatggaaagtcaagcaaacgttgtcaatgtgtacgtgaaattgtcaaataaacctcagcaatttctatgccctctttgtgctgagtattgtagagggtgaaggtgtgttttccattttatacgtcaataaaataaaatatgtattacttaaatacacatagggatgtcttttaagaacttttagac

SEQ ID NO: 503 - DNA, 6812 bp, Apple latent spherical virus
  source 1..6812: mol_type = other DNA
tccgttttagagcttgtgagttgttattacgttttgttgtttgaatctctgttttgttactctgatttccttcacgtttgcaccttacactctctaccgataaacattatcatcttttattttgaattttatttgaaaaatttttatattttcaatgtcaatcactactcctgtagtgattcgctttgggagttttgactcccctgctgcggcacagattgccgatactaaggaggaggaaactcctctctctcgccttgcagctttaaatcgcaaggctcaaattgctgctcgttcaagagtagcagctgctgcggcacagtatgccgaagagcaggagacactagttctcactgctcaatccatgagggatgctctccctttatggatgaggggtcttgttgcccccgctcccaaatccaaacgcgctctcaacgcgaggcgcgccgtaaggcgtgggaagcctctgaggaggctgcctgggttcgtgactacggtcgtgaacccacttcccctctctctgtttgggagggcactcctgagctccttgctatggagcatgcttaccttgccaagcaaggtgataagcgcatctgcgctcatttgcgcagacaggctctgcgggctgcctacaaagcccgatgtcaaaagagggcctttaaggtcttccaggaagaatgtgaattcttccgtctccctgtccacattgtggacaaaatccaaatcccagggcaggctagccccgtgccagagagcgtatctctgggtggcggtgttaaaaccgctacttctaagcgccaagtgaaaactcggcgctctttctcttctttcctcccaaaggaggaattttcctttgtgttgggcccttgcccaacatcttcccctgaggttactccaacctcaaccccttcaaccacccccccttcttctccacgggcatcttcgcccagaacccccttgcctcaggttaaagaggtgaccacacagggtattactctgtgttctcatgggcctgcttgtcaggaacatttttgttttggttttctagatctcaaagatgagtttcatgcttccacttatttaaagtggatgcttggaacccaactacctgggtctattttttgttttgacctccaagtttctagttatctagagcactgtacagatacaatggaggctattgatctgtggtggcatgttatggatcgttatgtgcgtaattacagagctaccaaatatgtcactaaagacaattacttaacaaaggctagcattgctattgatactgctcctaaagagtttatcaataagtgtaaattgttgaccaagcgtgcgaagcatcgaaatttgtcaaagaaagaatcttatcttcttaaaagaaatgaaagagattctaaatattgggatgcttttatagccttacgtactaatactaaagaaggtcaaggacctatagattgggtgaaggctggttatcgtaaatgtaaagaatactatgataacaccttctccaaatttgtaaatcaaattatgcaatcccttaatcctctaactatgatcctaggaccgtttaagtctgctttttgggaatgcgtttcaaatctcaaagataaatgtgttggtatgataaacgatcattggcttgcttttgcagcaggttcaacacttgttttgaccctcatatttctttttgcgatgatttgcatttgtaaagtttttgtatatttactatctactctaggtatagttgggtgtacagttacttttcttgtaacttctttaatagttattttctttttatttaatggttttctcgaacaagctgcagatattcaactttgtgagcttgttggagctgattttttaaattttttgaaccaaaatcaaaacatcgctcctattgctgccacaatggctgatattaaagaggaagctctcagagggcaagggttgcaatggtgttttacagctttgtataaattaatttctagattaattcctggtggagctaaggaagctgccatcatgtttaatagcgtaggtaatatcagtcgaagcgcaagtcatgccaaggatttctttgtaaatatgaaggaaatgactacttcttggattgacgccctctctgatgccctggctcttctaggagatgactctgtgactgctatgcacacattaaagcatctctgtgagaatgatttcttggaatgggctaagagagttgagcgctatgcaggtgatacatatgattctatgattttgaatcctgcagatcgacttaggataattagggaattagttgaccaacaagtgggctttcaaaaagccttctttaaccccagaatagcttcaaaggcacctagattgatgctcactgaatttcagcgcttatcaactatgttgagagattgccacagtgcactttctcgagctgccctctttgatatgcaaagagttcctcccttttggatacatttgtattcagagaatggcggcacaggaaagtccatggcaatgatgcctttgggtaattatttgttagattctattgaggaacctaagacccatagattcgttactaggaatgtagcctctcgatttttgaatggctaccttcaccaaccttgtttcctcatggacgagtttggtgcagctcctaagacggactatatggacgaagtcactatgttggatctcgtttctcctaaccctttaacgttgaacatggcagctcttggtgacaagaatatcatgttcacttcaaaattaattatttcaactgctaatcgtaggctagctcaccctgatgtaaaacttggggctaatttagatggctttctcagaagacgccacattttggctgaggtggtgttggctcaagggaagccatattttcatgaatttattcttttgaaagcgcgaactgagcagaaaatttatttggatcaagcattgcgagaagttgcaagccccatccatttaagtcctgctgaattttatgcagtttgcgctgagcaatttgtaaattttttaaatcaacaagggaatgctctcattgaacagcagggagtttcctatgttagatctgacgatttttcttttctcaaggattatttgcagtataagatgggtcttgattttcaacaatgtgaaatagagagaatagttactgattattctctctctattaaaaatcaaactatctttccagctgagcatgaacatattttctccagatggagggctgaattagaagcattatccttgtctgaactaattaccatgctcgataagcatgttaccgaaacttttgtatatactctaattaaagagaatcactcaaatgtggttatgtctaacctaacaccttacgagtgcttaatttattctttttgtaaagataagtataagaaagaaactgatgcaaccttctcttctcttcctgaagaggaagttaagcagccttggcttgcagaatttctttcatttacggcaaggctatgtctcaatgtgcccaaatgggtcacattggtcctagccttgtgtgctttttgccttgtaggttatgtactaattaaatttgctataggtttgtttacaggtgcttgtacaatttttagtgttttagctttttcctctttgtctgctcagggtcctgaggattctcctggattcgaaaacgctaggaaaactgctggggttaaggtgcatttcgttaaaacatccttccaaccttctgactggaaggggattaacgttaagccctctggatttaattggggggacgttgctgatgacgatgatgctatccctttgtggggtcaagggcctgatcagaatcaaaacgttctcaatcttttgaaacaccaagttgttttaatagcagagcattccaaggttgtatataatgctatagcccttggaaatagaaattttttgtttactaaacacgtttgggatctcatgccaacctgtaattatggtttattcgggtatgcgattgctaaaaataaaatatacattaatcctaatgttagaccagccattcaattaaaaaatagagatttggttgttgtacagttgcctgattctgttcctcccttctcagccttacctaaggatatttttctaagtaacttagctgaagcacctaaggttgctaacgctgctcttgttgtatcagagccattgtacgagaaacgttcagtggctcaactacaacaaaagatttacccttttgagaacctaccccaaattcatagtagagacacttactcttgtgggtctttgggctcaaagcctatgcctgcctgttattcttatacttttgatacttttgcgggcttatgcacttcacctcttatttctatggatggcggcaggtgcgttttactaggtttacatgtagctggagataaaagtaagatggggtatgcacagatagttaccctggaagacttctccgatattaacttttctgagaaggttggacaaggacccgagcaaatgtatataccaactgctcgatctgaatcctttggatcagtctgtcttcttgggaaatggactggccctaagccttattttttagagaatagttctttaactccctctctaattcatgactgtatagatatagacatgacaacggagcctgctattctttctaagaaagatcccagacttcaatacactaacaataaagattttgatccttttctctcaggtatgggaaagtatgctgttgaggctcactcctttgatgaagatgaagaattgtttgaggatgctctagatcgagttttctcagagatacctatgtttacctgtgaagatttatctaatgatcaggtatgcaatggtatagaggacgatgattatgctgaaggattggttatgcagactgctgaaggttaccccttctgcactatgcggcccccaggagtcacaggaaagacgtggctttttgcgggatcaccaggtgattggcacatagtccccaattctcttcttgctaacgaacttaatgtcaaagagttgaaccttagcaagaatatttttgaaccagtgataggtatagattttcccaaggatgagaaagttgattcttctaaagtgtacataaaacaaaaaactcgactttttactatcctacctgttgattataatattttagttaggaaatattttctttcttttgtttcacaacttatggccctccataatgaagttcctacaaaggtaggtattgatccaatttctaatgaatggtctattctttgtcattctcttcactcaaaaggaaccaattggttcaacggagattattccagatttgatggaataacacctcgtaatgtgcttcagggcattgtgaagagaatttcgcgtagatatgctaacaagagttcttttgctataacagatcctacactttctatcaatggtgatcttgctagatcccttttgatggatatgtgtagcactcgatatgggctaactaatggggacctttggtatgtcacttctggtataccttcaggatttcccttaaccgttatagttaattctttagttaattctttctttgtgcactttgcttatatgaagcttcattcttctgaagtgcacaaggctttgtatcctctttattcttttagaacccttgtatcatatgctgtttatggggatgataatctaatttctgtacatgacacaattaaagatacttttaatttagttactatatctaacttattgttggagcatggtgtgactcttaagaatggagccgataaaaatgaggaaattttatctccattctatcctatagagaaggtggattttctcaagagacgattcaccactttacaaggacatattgttgctccacttaacactgttaatataactgagcgcttgcactgggttcgtaagggcctaggtgatgctgatgccacacttgagaactgtaaatcagctctctttgaagctttatttcatggagagctgtattacaatgatcttcgaggcaaaattgaaaaagcttgtaaagtgaagggccttcctttgatagtcccagattaccaagacgctctttctttatttttaactggaggctcatatgctaaggctattcaggctatagcgatgaatctccctgatagaatctctctgtacaaatctgaattctatagtgtacaaatatatcctcaaattttttatgtgaccaatgagagaaatgtcacacttcagaaattgctggagaccactactctccgtaacatttgttatgtttctaggaactacgagtctaggagcagttctaggggtcttttcactcttaagggtgaaggttggactccagctgctttgaaagctcgtcttagtgtgtacaaagctatggccaaacctgtttacttcgtagatgaggctaatgatggtttggctatgttttattgcttagattatgcttttcgtgtttgtggtttaacccggagtcaaattgcaaaaattcttaatgcagtttttggtggtaaccccgaagtctgccaaagaattttccaatttttctctcaagtcgagccaaccaataagtacattcctcccaatcaaaggaggtaatttgtttggtctttcttccttcttttctttctttctttcttttgaactagtttgttctcgtgatccttggatccgttaaggtttcttgctggttcttccttaagatgagaacatgaaccagtctagttctttttgtttgctgtttattttatttcagtgtgtttgaaaagagtcggatagtccaatcc

SEQ ID NO: 504 - DNA, 8170 bp, Soybean latent spherical virus
  source 1..8170: mol_type = other DNA
tttaatatttgcaatgtctttccattgtccaagttctacttgccttggttacactcaatctttctctcgccgtgatatgcgagagcaaggggatcgttgtccccatgctatgtgtggtgctcttctagtgaagaaggtgcccactttatccccacagggtgccagacctgtggtatcaaagaccactgttgtggtccctcctcaagccactgaggaggttttgtattatgggtgtgcccccagacccgcttttcttgaagcggttttggcggccccaaaattaaagatggctccaccagtggtggatgcgatggaagtcgcatacctccgtggtgttgcagccatggaagctgaggagaagaaactcctcaggaaagaaaaggctgcagttgtggcccgtgctaaggcacggcgagctgcaaggaaggcagccaagaagcaagttgccgagatgaaggcaactgtggccctgaaattggccacaaggcaaaaaactgcacgtttgagtgcagctaagagggccatgaaggccaaaagaaaggcagccaaggaggctgccaggttggcgcttgaagagcgccgtgctgcgggtttaacccgcaaatcggccttcaggcgtagcctgaaaaagaaagccactaagatggctggtaggaaggtccctaagacctccacttccacctttcccaaggtggaatctttttcttgttttccttcttctcccctccctgcttttattagggaggaacagccctgggtggctgtgaataccccctgccctcatcctgagggcttcgatttggcggttgatcccgcctttgtggctcctattgtggggccaatcgttagtgtgccatttatggcacctgttgtgaaggcttttaatagccttgtagaaattttggcggctatcaattatgaggccgctgtagatttaagagcctacattttagaaatagcttcttacgaaaatttctttgctttacggagaatttttgttggaaaagctttatcttggatggctcttatcctacctctttatccctatgcgggcatctttgatacttatctcccacttgatatggtggaagataagaattgtgatgcttatttagcctcattacagcagactgcagtgatggtgctggaagtgacccagggaccaatggacgcacattctatctttgatatagtgcgttccgttggttctaaggttgctagcataaaggacaaggtagtgggatgtatagttgagaaatctgctgccctgttggacactgttatagacacagcaaagggcatgttttttggagttcttggcccataccttgcccgcgcacagaagatcggagaggaaattaaaaaattctgggataactgtgtcgagtgggcaacaaaattgtggcaaggagctcatatagcattacaagctcttggcatttatgctgtttgggctatagttgctatggtgcttgtaggagtaatgtatatattagaaacaattttgatttgtttaggtgtaatgagtggtcatggtgtccttgttgttgctttgacaggggcagtcatgacttttttaggttttactgtttttcagatggggcgtgagtatatacattttttgaccgccctacgtcaaatcattttcttagcagttattccccaaggaggattgactcaagttaatatcatggattcgtccgttgatgttactgagccacactccttgttagatactgctatggcaccagttcattttttggaaactgttgccagtggtttaacattcttttcttctacctctgttacagtcttaggtaaattaggaaattctctggagggaattcgcaaaggttttaattgcctacgcgattttacttccgttttgttagaacaatttggaaatgcttttgaatacatttccggtaagagaacgtctttcttccgtgatcttgcgtgtgcagttaaagtagatatcgctcgatggacccaggatgcacgggaaaccattgagtattttgaaatttcaggttcccttgataggtatgagtattatcgtgctcgtgagcttatctatcaaggtcaagatttgatcgacaccgccaacaaagctcgtagttcgcacacaagtgtaaaattcttgcgaactattggcaagttggttgaggaactaaaagaaattcgtgctaagtgtgcacgaagtttaaaattcccaggatggcgtcgacagcctttttgggtatattgttttggtgagagtcaatgtggcaaatctactttggcaaattatttgatgccattgttgatgtctcacatgggttgggatcctcaggatgtttacagcaaggatcccgttgatggttactggtccggatattatcagcagaagggtttaaagataaatgatttatctgctgttaattccaaagatgtagcgcccctcgagcagcagttgataccattgatatccactgaggagaaaatggtgtcttcggctgaaattgaaggaaaaggaatgcagtttgcctctgaaattgtagtttcttcatccaattttaatgatgcaccaactggtgctgaaattttggatgcagatgcttacagacagagacgaaaggttttgatgcgctgcagaagggctgctgagtgggttcataatgctgatggtacgcgcacagagaagcttgatgctgagggcaaaattgtatataagccctatgatccatccaatgctttatcttgtaccgaggtgcaatggattcatcctgtttcatttacagctcttcccggaccctgtgggcagtggcacttagccgagttcaccatacctatggtgaaggaggctatggatgcccactttttgcaagaagaaacaaagatggcatcctggaagtcgagccttggcatgaagagtcaaacagcaaggaaaatgggttcatacttgcaggatatgattaagggtattggtaattttgttacccttaaaggagcaaaagattcagatcctcgttatttgctggtagctgttgatggaaaatgctatgcgttagaccagcaagggaaagccactccttatgaggattgtgatgttgttgaagaaattgagcggctaactttgttgcaataccgctcttatttcgcggacttggtaatggaacatgctgacaatacatattatcaagattcattccattcatcaacagtccgagattttttgttggctctaatgaaagatgggtcaactgttttgtctgtggatagtctgggtagtagtactcaggacattcacaaagaattatgggcagaattgggactttcagaaaagatttttctgagggtttcacaaatagctcgtaatcaattgcgcgatgctccacattttaaggaagacgttgcgcacaattttttggaaactatgaggcatcttagggatgctattgtagatagaaaggaacaaattcttttattttttgcagcagtagctttagtgggcttgtttagttggggttttttgagcctaattaaacaatttgcttgtggttctttaggatttggtgctggcatcgcattgcgtgagcaaattgctcatagtagtgttatgtcttcaggtagtgtgactagtgcctttgttgcacgcaacatgccagttgtatggggcaaagctgctaggtatgccactgcacactcaagcaaagaagaagtgggcgccaattttgattattttgaagatgctagtgctcatttgttagctcgtgttgttggctcatctggtcagtctgagacctgccttttatttggtcatcaggctattgcactttgtgcgcaccagttgagattgtttcctgacaatgacagggtgactatccattatttttcaaaggagaggcgccctgtttgtttttcatttacttggcattatattaatgctattgagtggcctgactgtgaagtaattgtatatagagatgcacagctcacgccactccctgtatatagtgatgataattatttgtgtggggagcaaacattgcccacagttttaacgataactgggctctcaattaagaagaagaaattctttgatgattccacgttgtgcccaagcgaaaaaattctggacggtgaaatgcccatcgtccggagctggaaagataccgcttctctgagaacgcaagtccagacaattttgtccgagactcatagaagagatataaataggtattatacttctagttacccatcagggaaacatgatagtggaggtataataactgcagttataaatgggaagcgtaaagtgataggcatgcactgtgcgggggcgcaaaatgggaaaatttatgttagtaccattggtcttttgcccacccgcaacattaatgatgcacactctgctgccgattattttgttccaagtattggcagggaggaaaaaggattttgcaagattggttggattgcagatccttcaaagagaccacatgctgccactaagactgcattggcaccagttcctaaggaattggctttgccattgccagagggagtgtctgtaaagattccttctattttaagtgcagcagatccacgcctgcgtgatgaggtgaatcctgaatttaaggattatgatcctctacgcgtaggtatggataaatttgccaaccccatggatccgcttgatgatgaagttttacagcgggtctgtgaagatatttatgaaacctggtatgactgtttaccaatactagatgatgagaaggtcttcttgcaaaagacctccttggaggtggcgttgaacggtataccgggtgaggcttgctatgaagccatgaggttggatacatctgagggttatccttttgttttagaaaggaaaccaggggagagcggcaaactcagttatgtacatattgatgagaatggcgttcgttcccttattcctggtacatcggtttttagagattaccatgaattgtcagcaagtatactgacccaagtgcctgtgttgaattgcattgaatgtcctaaagatgagttgctaaaaccatctaaagttttggagaaaccaggcacacggcttttcgatgtactcccctttacacataatattcttttgagggagtattttttaaatttttgtgtttttctccaacaaaatagggtgcatttgccctgttctgttggtgttaatccatattctcgcgagtggacctggctttttgataggttggctgcgaagagtgataaagctttgaattgtgattatagtaaatttgatgggcttatatcacatcaagtctacatgcacatggttgcaaccattaaccgactctttagagatggtgaggaagcaaattgtgcgcgtaagaacttgtttttaatgtttacatcacgcaggagcatctgctatgatcaggtttatatggtcaaaggtggaatgccttctggatgcgcactcactgtaattattaattcaattttgaatgaaattttagtgcgctatgtctatagaataaccgtcccaatgccagccaaaaactattttaataaatacgttgaattggtggtatatggtgatgataatttaattgccatacatgatgatgtggtctctttttttgatgggcccattattaaggaaaaattggcagaggttggggtgaccattacggatggtactgataaatcatcacccaccttgttacgcaaaccgctggagtctcttgattttttgaagaggggctttaggaaaattgaagggggaatgtattcttgccctctggataaagggtccctttactcccggttatattacagtgctggaggtaaagggggcctttttcaacttgatatcctccacgataatgttaaatctttcttggaggaactgacgcatcatgctgatcattatgaagagtttcaaagagtgcgcagtttttatattaagcgtattccttcatggtcagctacgctgcctacctatgctacatgtctgaatatgatggaggggcagcggaattcagcaacaccctggcaaccacataaatttatagaaacgcggccttcaggttgcgaaactaaaatgatggcgggccaggataatcatgctcagaagatatgtgtaactgagcgtataattatatgtggtgaaaaatatacgccaccaatactggagacctcttttgttgtttcaatagacaaccccctttatattggtgaaaggggggagtatgttaaaacagagtttggttcaggtatggggcgactgcctactgatgcctggatcaaagctttctccagtcccaagaagcacccacagctttttgaagcttataagatgggtgctactatatattttagatcctgcatgccctatttaaatgcatggtgtgcagtgtgtaagtttgcattggctcatggaatcgatcagagttctattattgctatgtatgagtcatgcaaaccaagaggggcgggcgacattgctcctcttgtggccgtaaaggcatacactaaatttgtgaacagaccagtgtttaaatttaaagagactgttcataaggaagtgctcgaagcacacaatagtgtgcgagtcgcctaaaatgagggcgcttcctttctttactagtttctttgtaaaagtaaactagtccttgggggcaggtagctccctccagcagcttggcacttgattagctttaatagtgttagctacccttcagcaaggtaggagctgcggtcgtattcgaaccgttcccgtggaactactcggggttggaagcaatggcgtatagacgctggtgtcatagttcttaaatcttatatgacactagagaggagagccatccctcttgaagcatgcaataaacaaggttgcaccatgaaactagccagcacattgaaaaatgtggcttaagggcttaataccttcgggcgttttggtggacctaacgttatgcgtgattgctgatggtactaatgtactcatgttttccattacatgataaaaggtggattcccttttcagctatgggttatggaatgatcaactcatgcaccagagtgtactaggttagtgtacaaccctctttttgctacctttttctttgcatgaataaaggagatagttcctgtgaaattcaggttcattatcatttactgctttaatttacttttatccctcatctgagtgagacagatggtacgggttgttaataaaagtgtttgggatgcactgtctgatccctcgctgctggagcgatctgagtccagccgcatttgctgcttttagatataagcagatggaggactagcactccccttgagaacaaaatcgagtgcggcctagtcgtctaggatttccttagctataggtgatcgtgggctaatgcataccacagaaacatgcttcgtctttgagctaagtgtgaccgtgatggacacttgcctgtgttctttagcacagtgtgatttccttttagtaggtgatgatgaatgtagttttgaaactatcaccgaggtctgggaatataagcgttttggcaaacgatattgccttaatctgtgtacgacacaattgatagtgtactcaagagagtagggtctggcagcctgaatcttggatgaggtcccgagatgaaaacgggggggtaattaaccccagctatcggtacacggagatttccacgtttatgtaaatgtggcgcatttgctgtttttagatataaacagatattgcaggtagaaaacctgtgtggatacctattcttggagaaggagttcgctcggaagagtactatcttgaaacatttcaaaaggaaatttcattttaaggagagtaggtaagccattatacacctgtgaggagggtacaagataaagctactgctaaatttaatgctactggaagtgattcccagggctacatgcggtgccattgtacttatacctgaagggtgagtttggaaactcctacctattgaaatggtgagaagtgtttatttagtaagctcctaatcattatagggtgacgttgttttcgcaattttgttggtctttaatccttttcaaaattgcttttgcattttaatttatgtacgactcggggaaaagaaccactgtgtgtgtgtttggattcccaatgggtagactataccaatgttagtccccc

SEQ ID NO: 505 - DNA, 76 bp, Spinach latent virus
  source 1..76: mol_type = other DNA
gtggtattgtgcattattattttaacgcacaacccggattaatcaggttttctgagtatatacccgttagtactca

SEQ ID NO: 506 - DNA, 71 bp, Spinach latent virus
  source 1..71: mol_type = other DNA
gtattgtgcagtattattttacgcacgacccggattaatcatttttgtgagaatatacccgatagctctca

SEQ ID NO: 507 - DNA, 113 bp, Olive latent virus 2
  source 1..113: mol_type = other DNA
gatatttcgcactcctagtgaatcttcctagtatatccgttgaaaaaacgagagtgcaacaacaaaaactacagagttctttttttttaaaaaaaaaaaaaaatcaaagagac

SEQ ID NO: 508 - DNA, 80 bp, Citrus yellow vein clearing virus
  source 1..80: mol_type = other DNA
gaaaagcaaacattatcatacacaccccaaaaattgtgatcatcgtctctgcatcaacagctcagctaagaaccagagaa

SEQ ID NO: 509 - DNA, 74 bp, Potato latent virus
  source 1..74: mol_type = other DNA
tcggataaaccaaaccaacaatatttacacatactcaagttaaacatacactgttcaatcttgcgtacgttatt

SEQ ID NO: 510 - DNA, 35 bp, Apple stem grooving virus
  source 1..35: mol_type = other DNA
aaatttaacaggcttaatttccgcgctttacgtca

SEQ ID NO: 511 - DNA, 73 bp, Citrus leaf blotch virus
  source 1..73: mol_type = other DNA
gaaaagcaacgaaagcaacctacacaacccaaaattaatatattgcaataactgttatcactcaatataagcc

SEQ ID NO: 512 - DNA, 13 bp, Soybean latent spherical virus
  source 1..13: mol_type = other DNA
tttaatatttgca

SEQ ID NO: 513 - DNA, 192 bp, Spinach latent virus
  source 1..192: mol_type = other DNA
tgttttatttataaaacctggttaagggtcctccgggatgtgctcagcacctagcctaagccaagtccatatgcccacctatgctgctccgggtggatgcttatacatgctatggatgcctacatttgaaataatgtagatgcctaatactctctctcagggagagagtttagatgcctccaaaggagatgc

SEQ ID NO: 514 - DNA, 194 bp, Spinach latent virus
  source 1..194: mol_type = other DNA
tgtgttcctttcatggaacctagtgaggggccctccggggtgtgctcagcacctagcctaagctaagtccatatgcccacctacgctgctccgggtggatgcttatacatgctatggatgcctacatttgaaataatgtagatgcctaatactctctctcagggagagagtttagatgcctccaaaggagatgc

SEQ ID NO: 515 - DNA, 258 bp, Olive latent virus 2
  source 1..258: mol_type = other DNA
tggtggctcgcctagagcggtgtgctggtttctacctaaggaaccaggagagtggagtgacttggtcatgacaagtcgagtagtactttaactacgagtcgtcgttgagacgccggtccccttccaaggggatcgagagggttttcccggtactttacccgggattcgaattgagctgtctttgacagagctcaaactcctcgctagatactctaacgagtgtcttgaggactctcctatggagagtcagtaaagacc

SEQ ID NO: 516 - DNA, 36 bp, Citrus yellow vein clearing virus
  source 1..36: mol_type = other DNA
aacataaatattcaggctttcagtttccattttctg

SEQ ID NO: 517 - DNA, 76 bp, Potato latent virus
  source 1..76: mol_type = other DNA
ttgagttgtgcataaaacctaattaattttaagtgtgcaactataaaataaataaagttttaaatatttttccttt

SEQ ID NO: 518 - DNA, 142 bp, Apple stem grooving virus
  source 1..142: mol_type = other DNA
gagtcgtgtgaaattccgcaaacttggtcgcggtcttgcaggttgacatgcctgcctttatacttaattaaagggttcccccggttttctgagcatttccgggttagtgtggtttttctagagtctagagtttgtccactct

SEQ ID NO: 519 - DNA, 541 bp, Citrus leaf blotch virus
  source 1..541: mol_type = other DNA
tcccgaattctggcatgggcggatgggtgggccaggactttacactcttaaagtataagtaaggggtaactcagccgcacgggtgaagattgtgcggagcctcatgaatctgaatccaagatgctaaaggggataccgcgatctgaggggtcatgggggttagcctgaagaacagaacactcattaagtatgtggtgacgcaggtcccgacaacccaaaaaggtgagctgaacctgatccaattggagcagtacaggtaaagttatatcctttctataaattgaaaggtagtttggacagatacatgtcattcaattggtgtggaacgttagtccaaatgaaacatttatgcttggatggaaagtcaagcaaacgttgtcaatgtgtacgtgaaattgtcaaataaacctcagcaatttctatgccctctttgtgctgagtattgtagagggtgaaggtgtgttttccattttatacgtcaataaaataaaatatgtattacttaaatacacatagggatgtcttttaagaacttttagac

SEQ ID NO: 520 - DNA, 191 bp, Apple latent spherical virus
  source 1..191: mol_type = other DNA
taatttgtttggtctttcttccttcttttctttctttctttcttttgaactagtttgttctcgtgatccttggatccgttaaggtttcttgctggttcttccttaagatgagaacatgaaccagtctagttctttttgtttgctgtttattttatttcagtgtgtttgaaaagagtcggatagtccaatcc

SEQ ID NO: 521 - DNA, 1569 bp, Soybean latent spherical virus
  source 1..1569: mol_type = other DNA
aatgagggcgcttcctttctttactagtttctttgtaaaagtaaactagtccttgggggcaggtagctccctccagcagcttggcacttgattagctttaatagtgttagctacccttcagcaaggtaggagctgcggtcgtattcgaaccgttcccgtggaactactcggggttggaagcaatggcgtatagacgctggtgtcatagttcttaaatcttatatgacactagagaggagagccatccctcttgaagcatgcaataaacaaggttgcaccatgaaactagccagcacattgaaaaatgtggcttaagggcttaataccttcgggcgttttggtggacctaacgttatgcgtgattgctgatggtactaatgtactcatgttttccattacatgataaaaggtggattcccttttcagctatgggttatggaatgatcaactcatgcaccagagtgtactaggttagtgtacaaccctctttttgctacctttttctttgcatgaataaaggagatagttcctgtgaaattcaggttcattatcatttactgctttaatttacttttatccctcatctgagtgagacagatggtacgggttgttaataaaagtgtttgggatgcactgtctgatccctcgctgctggagcgatctgagtccagccgcatttgctgcttttagatataagcagatggaggactagcactccccttgagaacaaaatcgagtgcggcctagtcgtctaggatttccttagctataggtgatcgtgggctaatgcataccacagaaacatgcttcgtctttgagctaagtgtgaccgtgatggacacttgcctgtgttctttagcacagtgtgatttccttttagtaggtgatgatgaatgtagttttgaaactatcaccgaggtctgggaatataagcgttttggcaaacgatattgccttaatctgtgtacgacacaattgatagtgtactcaagagagtagggtctggcagcctgaatcttggatgaggtcccgagatgaaaacgggggggtaattaaccccagctatcggtacacggagatttccacgtttatgtaaatgtggcgcatttgctgtttttagatataaacagatattgcaggtagaaaacctgtgtggatacctattcttggagaaggagttcgctcggaagagtactatcttgaaacatttcaaaaggaaatttcattttaaggagagtaggtaagccattatacacctgtgaggagggtacaagataaagctactgctaaatttaatgctactggaagtgattcccagggctacatgcggtgccattgtacttatacctgaagggtgagtttggaaactcctacctattgaaatggtgagaagtgtttatttagtaagctcctaatcattatagggtgacgttgttttcgcaattttgttggtctttaatccttttcaaaattgcttttgcattttaatttatgtacgactcggggaaaagaaccactgtgtgtgtgtttggattcccaatgggtagactataccaatgttagtccccc

SEQ ID NO: 522 - protein, 3582 aa, Citrus tristeza virus
MSKLRGSFWSSAIAVNSDYTISRIWRKLNTIVVLHYFGFVRITKVIRDKSADMPIVPLRKSVFPFSVRAAVTSFVLLGVLLTLRIQGASVAFPLSTHLALFVPALFAGFSRFSLCKPPLTSAAKRSLRQAKRESVSLSSRASSRFSREVPRGTRSRLHRRVVRRADTAPVESPQDKPTRRNSRLGKTSHLPYVGEAALDDILRWIEEVNPHPSMVAIPVPITFGTMPATAWCSHSEAAVLRAALTITRLKLISPLRRNTYGTSIMTYLLPLTVPVRFLPASASIFPSKSKLGVEVPSGRDLHTAFVRSSHASAFFSDAVRASFVPSSAEQFFHFRRQRTHVLAITDPVLCGTVSVLMSDGVNTARLDVVAPAYYAYAESLGARVRFLWESSDVDDAKVRDGQCYVRHVFDVALYFGRRADLSVRRALGMYPTVGALKAYLVREYGRDSLKVPMRGTYTFGSVFHCLSLNLQVDLRSIPNHHLVGGTSAHVLIGQVRVSVPGSIVKPSRSAVRRRNRRMRRDGFLGSSGSSSSAGESTRCSDCSSPRGLPSPSVLKPSLGRIPSIDRRFRFPAGTQLRVSVPRRVDDHVYVSTGSNFDELCHAVLTRMSKGTTLEILLHSIRERKGLLGFAACFRWGSSHVFVKRGNFTARFPISAVRYENQYAAVMMDVGTSWVPKGYVPDVDVVKRRRSRNRRFPLSHRAVDQSVPALQSSPVEVASVSSDKPSSSQKASSPSTSSSSSFNSTRSSDWVNVGFSHRTTNKVREPRYAGHRRIGNFTFPRGTVYNTPVDERAYKRVLRLRDTTACSFLRILLARLSGYRPLSDEFFNKCVTSRFVACIEPVESGLVKVHFRSDVFRASFPFDGQPIHPATALTLEVVVSWDWMVTAFQNPLKDGYCYIRHFAEVSLSMGRIFFRRDVDLGPFPYVFEVQHRLERLYGKAALRYGVRGQYSAPRCFHCCYNDSPRPMASFNGYHKMGGEDNSLIITDTDRLRAVGSAYEKVKRNIPDSLLVRSVEKDLIEFNQTLVDMHRSRPGVVVPFQMSENQQVMLTRAYPEFNINFIHSVHSDHPVAAGSRALENHLVRKHAGTDYSDVGGCPLFHLRAGHSGVHVCRPVYDVKDAHRRVVRHHQLSKVSLDQSDGVKQVGWTVNTNSVCGNILGECYHASEAMVMVQVYDVPLRELCRAMINKKTSVCYMTMVTPGELLDARESFFIKDLDCSVELDPIADRVVYCFNNSAYTHTYSTICECMRTPCLVVDGFLFTIEMVSLRCSVNYYCITKSSVCPRISETKRLRYRRCDSDLIRIKIPRYSSKTRSCLPGCYYLYLDAKFVSRVYEYVVNNCVVVNAKTFEWTWNYIKSCKSRVVISGKIIHRDEPIALEYLDGFSAVMLSAGVKGRQNADVSRRLAAFSGETSIFELVGFAISEKCRDLFLGIQDAVERCVKSYLRNSFNMSFVDLSDPLLTISEYSELDVPIDLPGFGGIVDGNETRLMEDGVKSALLRKAVQAEAQLSLKRGNTSEIVPCDDDDDSNGDDSRVSLDTDWWFVLRGGSSGGLRAGAAPSLFRCLLRKLGGGLCLAKKVLELLVKRVVESFSRLKRKTARLTSFANLLLARLSCGFFDDTVFSAVWEIAINLTRIVDGVVKTKLGCFRNLFRLIPKLYAGCKDVVKDVSNAYRSVVSFSAEVLGKSYSKLCQFCLEIFDIGLIEVSARNLGLETCVSIALAIFDVLITFPLGSVSFPVVCARVFGRLAMEVGSNFLFKKVFGKPETLGEDTFRRTVSMVLRPKAFDKLSVDAKGLVRCSGVIPGVLRIILSSLFSEDDAWVGYSKHEVSSLPIVTFCVKRLSYSLERCKEACVAFIVDSAKKILKSLTSEFNESIQNSDLTSGAKSLYGHVSSILYTSSGVINKAGSAVATVKAVGSDISGRVKRMRPRFSLSRHFDEQTSEYYSASDCSELDESLFSETPGLRGNARCRDLFRIVSRRAVACCEYVTILLKRLASRAGEYSYSYVMDTLVRLYVATDDVVRRCRSFTFDCTDKASNFVTGFLSWRSLRSGAYSATPGLGGGSRGLTSFSHTGGFTRVIGALGNTLSVVFDEEFFRTLLHRLRADVVVLLVEFLKNLPVCLFSIYTFIECRGRIFPLREFLWGFCRFVWDVIEGLSINTYQYLSAVAEKVYRGAFNRRFNEEDERTLRVITEAEGRIEFLRVVLAEMERFRAASNEVSSSRSSDSPSFPPTYGEIEELNDDSSDSALVIGVDNGTGRTIVDGETDSASGSDSDVSIPLDRDFEQIGRLGGNGNVDVVRLGLKFVLKLLRNLFDARSFKVLYGLLLQTLFYGGSVNKFVCRLVFSLGTCLPFELLRFACSARRLLKSLASFVYQTNLFSEVMVEHLFSVSRLLYDSRYFATVFSELERLNFYLDYFLSLPKRYLFPNSRARSCARVPVPVIRTEGVAPVRERSLNDILDSLDSLKVSDLKGKSTFVDDGESDSGSEHSGSSISFGSVNEEVLNAVNGDSVCEKAPLMKHVTALSRLERHPSGRKDIPVSRKTFVRGESSGVKSKVSMCDYLVTLNSSFGTVPDMYPVARDITYKKLTNAMREFYYSQKITLYELHGKLSSYWDELKVAGFDRKLTRMDLDDDVYVVDFNRKLLVGRNGSHPFRNTLKSYCFMFCNDGLVPCPRSQKYDYALISNQTSFVAANSFLRAVDGKDLTFTNEEHSLIVYEAPPGGGKTHSLVNSYADYCVKVSCLVVTANKNSQTEISQRISNELMGRKLAAKYVTDAASRVFTVDSYLMNHLRLTTQLLFIDECFMVHAGAIGAVVEFTSCKAVVFFGDSKQIHYIHRNDLGVSFVADIDAFIQPEHRIYGEVSYRCPWDICEWLSEFYPRHVATANVGSIGKSSVSIEEINGCDDVPYDKAAKYIVYTQAEKNDLQKHLGRLTVGRNKVVPIVNTVHEVQGETYKRVRLVRFKYQEDTPFSSKNHIVVALTRHVDSLVYSVLTSRRYDDTATNIDRAKEIFDKFRSSNHSYGSSSLEWYLEKYPTEYKGSKASSAPISCINEFLNEVVVGSSVVQLGDVSEELSSRPFESGCDNVTVETPPLLTRVTYTNRLAFGVVRSQAIPPRKASLQENLLSYESRNYNFIKTERFVGPSEFGRAMAAAVIERCFKMEEMAKIRCDIISLTEANILKWLDKRTPCQIKAVHGELKLPFSVEEQISNFKLMVKRDAKVKLDDSSLSKHPAAQNIMFHKKFINAIFSPCFDEFKNRVLSSLNDNIVFFTEMTNAGLAEIIRRIIGDDDNLFVGEVDFSKFDKSQDLFIKEYERTLYSEFGFDTELLDVWMEGEYRARATTLDGQLSFSVDGQRRSGGSNTWIGNSLVTLGILSLYYDVSKFDLLLVSGDDSLIYSSEKISNFSSEICLETGFETKFMSPSVPYFCSKFVVQTGNKTCFVPDPYKLLVKLGAPQNKLTDVELFELFTSFKDMTQDFGDQVVLEKLKLLVEAKYGFASGTTMPALCAIHCVRSNFLSFERLFPFIRGWYVVDALKLRQLRKLTNLICERVVYDNRVSYFSYFDNPFTKPDANDDNVDDLGQAGELATG

SEQ ID NO: 523 - protein, 1056 aa, Spinach latent virus
MDTIVQMKVLCYESMILLMIPSDVNAPRPETAIGRLISDAAVSGVLRQCDFTAAEASQCFVPIITGRSECIETRFSGREIQFRNFSYSSQSFAAAHRVCEADYIYSRFQTRNTTIIDIGGNFCTHSKMGRDNVHSCCPILDVRDGARYTDRFMSVAGALETQPDRELRLNYCSNKFEDCDVSAPWAMAIHSISDIPITSVVKHCFRRGVKKLIASVMMDPMMLVASQGFMPRLNVQWEIEPDEENKGSRRISFHFVDAPGLSYTHNYDVLMQYMTCNQVIISGKAAYRVERVADLSGVFIVEINPGGNCWNERLDLVPMRDVSCAWMTSLKRKTLVRVAIPQYIHSWEVKYVIADTDFVRRVAEVSFRQYKPETPLQDLVKSVATMISSASNHCIINGVTMQTGTPLAIEDYVPMAVTFVAFAKSRYDSIKEGMKMVRQRGTNIADPNDHYDYEKDGSDVKSFSNHIIPMKNTIKSLFFPMKVKMNDNSMLIYSQGILSTVVDEIKTLFGWDVWDTDDAVIQSLPSFYKMEDVFQVTSDHYCLSHTLSVDWWLEGLYDSYHDMRVAHKKKLDEEESRKTKVENALLKIAEVLEKPDVSDGLKALSELPIISSLLEKKSEEIVTKPQCRDTEKPHINPYADAIKEAQAYYEELEVVNTRNLRGVGDYLFWRKKSNYASVWGADESRVVLEPMARKFYSRDRNVSIPEYERGMTVDGFVSIKWVDGNITEDTWKCLSKYAVVLLDSSCVFDAGSRIMPGLKKALVMDANFKIVIEDGVAGCGKTTSLLKQAKPDSDLLLAANRETANDAKASGVIPKALEYRVRTVDSYLMLRTWFTAERLLVDECFLVHAGLVYAAATLARVKEVIAFGDTKQIPFVSRIPTVKLRHASVVGTLKPRTITYRCPRDVTAVLSEKFYGTKVKTFNLVKQSLELKNIDSSTEIPVEKDTLYIAHTQADKHALMRLPGMNGIEVLTTHEAQGKTRDHVILVRLSKTTNLLYSGKMPDAGGSHNLVGLSRHKKSLRYFSVFADDPDDQIATGIRWSKTLDEQELAAYRAAG

SEQ ID NO: 524 - protein, 797 aa, Spinach latent virus
MDSYHFLSQLCDLNVLTHALYVNQVFEIVDQSTTSYMQMWLYSRVIVPVLKYHLSGDIILDKLHDVFLGTFRSMMVPMIMLNRLSFVVKMTTMNHHRKAYLPLEEREKIHAATFLGHDHWASVTSGSSFYDDLEILADETVNDDLHFDKESSMPDEYQIMWNDGTIDSVWSSQFECEEPPKPKFIPRPSDKVCDPVVIQDAVNDIFPFHHEMDDRYFQTLVETQDISLEVSKCWIDASNFRDFVKGPNSYVEPVFQTGATSKRVHTQREALLAVKKRNMNIPELQSTFDLDAEVNTCFKRFLTHVVDLPRLKRLQPMTGVEVEYFNQYLLGKNPPVKEYQGPLTLTALDKYMHMVKTIVKPVEDNSLKHERPLCATITYHKKGIVMQASPRFLSAMSRLVYVLKSKIHIPSGKWHQLFTLDAGKSDAVKWFKEVDFSKFDKSQGELHHKVQEKIFNALKLPPGFVEMWFSAHERSHIVDREAGIGFSVDYQRRTGDANTYLGNTLVTLICLARVYDLCNPNITFVIASGDDSLIGSVEELPRGPGEFIYNPVNFEAKFPHNQPFIWLKVLVSVDLEDGGREVIAVPNPAKLLIGMGRRDCQYQALDDLYQSWLDVIYYFRDARVCEKVADLCAYRQTRRSSMYLLSALLSLPSCFANKKKFKWLCYRLREQGCLKKDIYPVAKPISAHNIRKEDSNGCDVNQGTDDSFSRKKNRGCWEYVPKMLQTDVSVPVTDKSFHSNRGSSVSPTDCGDGGCSRSASSIGSKNTKPRHRFRAAGVHQPSGRDPDRIPPNHRRSA

SEQ ID NO: 525 - protein, 787 aa, Olive latent virus 2
MAGVLYDEEYVPQEPDYLYCPYEWEGEDPTQCDANVPSVSYLVEAVKKSFTEGNHDMLISCESYHAECCEGPLMNKGLTLSTYFMSYPGISLPAFGGGVIHVTSARVCMQAFYAVTPGRCSCSCGTQFIYRAKGGTGLTFDATNTISSAFKFEDGKVKWLTEDLGLALLAGCFLKYVPIPHEIEIKIERKVEPVSALDFWEPEGLISDVHFVHPQERALAPEPPMDVEMVRLVRTELFEHFNPTLLLNARSDFSGEKLKEVELPRAQSEPLVPRVCLPRGDDALIDQFFIDKAPEHFNREPATDQWQVESDDFTVDFPTQVRLRERDEDWFRRKPDFAVSSIRTGLEMPRIATKKEMLMAFSKRNVGAPQMVEVPQEIHVKRLADRFFRTFLKEGGWDKGDGHYWDDFFHRKGRKVFSLENCYDDPLSSYLVMLKSAGKFSLDLNFPVRSVPQTITYHEKWVTEVFSPMFLQVMARFFSRLQDWVVVPAGPMADFSRVWPSFEGKCLTEIDLSKFDKSQGKLLHDVQREIFLRLGFPPIWCDWWFKFHESSYLNDKNLGIAFSVDYQRRTGNTATYFGNTLVTMIMMAEVYELDSLPFCGLFSGDDNLIVTDRPLEGRVSLFPNMFNMEAKVMRPGQNYMCSKYLCTVDGRVTPVPDPFKLLKKAGASCPLEHLDDFYESFLDYTKYLVRDEVRTLIPRLMAHRYQVSMDEAGVALDQIMSWRKSKTQFFKHFQYRKPIKDSLEAVKSDFLSAFGKVDDRIRVWRGRRTNHKKEVDALKVPLVSFRE

SEQ ID NO: 526 - protein, 1649 aa, Citrus yellow vein clearing virus
MATIRGAIERITDTTVRTTLQEEACRQIRAELKNVEHINRYAIQPDAADALEHLGIGSNPFSVALHTHGACKAIENQLLYVVGTLLPKERVTMLFLKKSKLNIMKRCPKFQDIFLNQHIEPRDVSRYCDFNVQSTSTSIPTRTAYISDTLHFMDRRDLVRLFLNSPNLETLYATIVLPVEAAYKQPSRYPEIYQINYDFDGFQYIPGGHGGGAYHHEFEQLQWLDTGHIHWRGPDCKEIRMTITAQMLESLGANHLFCFKRGKLLTPRVRTFGRDTQVLLPKIFRPADKNFNRAIPLTLANKLLLYAKSINTVTFRDVVAKTRQLMKDKELETYTGNDLLHMANYFFAVGALSGVNSYDQLLGLSAWEACTVRIKNTITNLWEKIAGKKEFGKLLEALEWETFTYSRQVTEFTVTGLPALLPLPDISDQEEIFAQQDELDKITAGATKIRTIDIMRGQANRANPKTPINSTPAQGPQLPDTPDPIDQAASKDLVTKLQKNKRIYIQDDGPEYLMGHMAEVPAWYLEQDDTTTRLKNRCAWFFGPPTYRYGHNDIEYTTIEYYPWVERIGAIFGKYNTCLAQTYDAGARIGYHADDEDCYDPDVTVVTINLTGNATFLLKTPTGTRTWKLKPGDFIIMKPGAQRCTKHAIRDCTTNRTSLTFRWQARTCPTNLRKITNLPKATNQPQTTEWRPVTKPRPSTTASSDTQTPLVIDQERGYTTTSDVTPTIRLPAENGNNTGAGPSSALTLADLNDNQAPTTNKGKEKLEEMVETGPTIMERFLNTVQEPTQDLWDSASESAASYLAEGLGISAIQALPWAPHLELINALGFQGTERQYGPDNCLIWPITHYRELPRSNNVEAPPEVLELLDCINRYPTDVPMLKTRAAAFGSDVKNLRIGALVKNQDKQWRASLALLCEENEHLLPTTVIHGAGGSGKSHLLQQWVASTERGNVVTILPTIELLRDWQNKCPHAPKETFKTFEKALIQNSAPVVIMDDYSKLPPGYIEAYVSLKGQCKLLILTGDPRQSHYHEENPEALISTLDPATDYFGKFCAYNINATHRNAKTFANALGVYSEKEIPTTITCSSYQKSGWPTLVPSILKRTALNDMGQRSLTYAGCQGLTTPKVQIVLDNATPLCSDKVMYTALSRAVDQIHFFNTGPNHTDYWEKMNATPFLKTFIDHTREETFAEHQPAEPTVREYAPATHFPPANENLALEPWVEPLTDKHSRELFHSALGHSNCVQTENTVVQLFPHQQAKDETLFWKTIDARIKITTPEENIRACSIATDIGDILFLNYKEAMGLPQDPIPFEQALWDSCQAEVQLTYLSKPLAALANAAQRQDPDFDSNKIQLFLKSQWVKKVEKMGCLRIKPGQTIASFMQQTVMLYGTMARYMRRIRTSLCPPEIMINCETNPNQIGTWVREYWNFNTQSHENDFEAFDQSQDANMLQFELIKAKYHSIPEEIIAGYRHLKCNAHIFLGTISIMRLSGEGPTFDANTECSIAYNHTRYFVPKGTAQLYAGDDSACASPLSEKPSFQHISPELSLKSKAKIRTQQKGDFATFCGWLITPKGLIKNPTQLYASWLLAKHNKDLADVARNYALDLRIAYQLKDELYELLSPEELDHHQLLVREMIKHKMGHLLNLPEGFKTN

SEQ ID NO: 527 - protein, 1780 aa, Potato latent virus
MALTYRSPLEDIVGAFEPSVQTAIANTAANHYKQLEEEKGILFNYALPPEAKQRLIGAGIYLSPFSAVPHSHPVCKILENHLLYVELPSRLDNSFMFVGIKNFKLDLLKRRHANLSMIQTINRYVCSLDKIRYGSNFVVRSSASYPELCRRKGELDGAVLRELVPELMIKSAKNLFLHDELHYWTHRDLITFLEVLKPDKLLGTLVYPPELLKGAKKSLNSWCYTYRVDKDKLFFYPDGVHSEGYEQPLSGGYLLETSRITTRDGEVYCVDVVCSKFAHHLIAITRGDLIVPTQRSFAPFEAITSKGLNNLVRGKVECFPVCASVVSKLYRYLRTLKKPDEQSAMAKLSQLQANPTGEEIHFIQGFAKLVINTNKIDSLINCDSIKVFMGKLFGPLPNWLTKRLRSVQEVSLDEFVHYFEPYVVNVPTKHVNYGFEFNYVMEDFRYEQGENDLVDMLDNFDGSTKMSTSLCMMTPYVGLAPLTTRRKFLCHIEENSIFRVVSRNIFCSYTNSYKVAVSTEGVVRILEIYSKVSVDLLGAYLGKLLKKTEFIERVRSRVKAIAIKHLKYTWQQVGLAWFTSGRRGYTKYIDCSPYTMNTFKELKERWGVIVRELSKQQDNAEAAKNIPEQEIQTTSKPSCVEKRNYFSNTLMTSFAASGVKGKEQVSSEIAKGRGERSELRATKLMGSCSTLGKVAHIASRKGSMGVLECVARVIKLDFQTALKFLRVKGVWMQEYESIGELEEEQIQSPAYDFCAAIAMTFNVEIELTFPGSELVYHFAASSTVSCIRLSIWEGVVTLMRAENDCVITACAQALAREPEDVVKVLKDRLEESILEEIWNGEGVPFERMYLFFEALDIQAHCNRDGAQLVLNGGGKLARCFVIKEDHIEFAGEKKVSRVLELQDARTSSKADPELVKEFQKAGTVVEYVAVQSRAQVLAKSLVDATTGVCSSTIFNDCESLERSFRFTESELARNVCCVIGTFGAGKSTLFKDMMRQCLGKGVHYASPRKVLANELKASLGLAKGKRNRKVGTENWNVHTFESFLKKAKNVAEGELVIIDEIQLYPPGYLDLLLYLIPEFTSVFAVGDPCQSDYDNEKDRHVFLGVETDVCRLLSGREYEFNVLSRRFHNLGFESRLPCRFKFPAGAVKEEYLFVNSMTEANELDSAYKSVYLVSSHLEKKIVEYQSDVKTPNVLTFGESTGCTFKYGCILITQVSSACSERRWITALSRFSHNLCFINATGVPIENVAKSYKDRSLGKFLCGTAVEGDIKSMAYGTPIFKEQFIAGVGRDEGVKEDKVTGDPWLKTMLDLMQLPDVEEAEMMQEEMQEEWFKTHLPQEEIEGVRCRWIHKMLAKEARECRMGSIVSDQFPDDHSKQEGKQITNAAERFEAIYPRHRANDTVTFIMAVKKRLRFSRPSVEKAKLTQAECYGTYLLKNFLDVIKLKPAHDEAMMIRAKEDFEQKKVSKSAATIENHSGRSCRDWCIDIGQIFSKSQICTKWDNRMRVAKAAQTIVCFQHAVLCRFAPYMRYIEMKLKEVLPARFYIHSGKGLDELNSWVKEGRFEGVCTESDYEAFDASQDQYIVAFELALMRYLRLPNDLIEDYKYIKTHLGSKLGNFAIMRFSGEASTFLFNTMANMLFTFMRYELHGDEYICFAGDDMCSSKRLRIKKTHESFLGKLKLKAKVQHTEKPTFCGWNLCADGIYKKPQLVFERMCIAKELNNLHNCIDNYAIEVAFAYKLGELAVNRMDEEELGAFYNCVRLITKFRHLLKSNVVEVFKRK

SEQ ID NO: 528 - protein, 2105 aa, Apple stem grooving virus
MAFTYRNPLEIAINKLPSKQSDQLLSLTTDEIEKTLEVTNRFFSFSITPEDQELLTKHGLTLAPIGFKSHSHPISKMIENHLLYICVPSLLSSFKSVAFFSLRENKVDSFLKMHSVFSHGKIKSLGMYNAIIDGKDKYRYGDVEFSSFRDRVIGLRDQCLTRNKFPKVLFLHDELHFLSPFDMAFLFETIPEIDRVVATTVFPIELLFGDKVSKEPRVYTYKVHGSSFSFYPDGVASECYEQNLANSKWPFTCSGIQWANRKIRVTKLQSLFAHHVFSFDRGRACNEFNHFDKPSCLLAEEMRLLTKRFDKAVINRSTVSSLSTYMACLKTANAASAVAKLRQLEKRDLYPDELNFVYSFGEHFKNFGMRDDFDVSVLQWVKDKFCQVMPHFIAASFFEPTEFHLNMRKLLNDLATKGIEVPLSVIILDKVNFIETRFHARMFDIAQAIGVNLDLLGKRFDYEAESEEYFSENGYIFMPSKSNPERNWILNSGSLKIDYSRLVRARRFRLRRDFLDPISKGKSPRKQLFLESTGNIKSNPNAEKNSESGEIKIEGSAENDQPHEVSHTSMETEDGQGFEGSIPVDLINCFEPEEIKLPKRRRKNDCVFKAISAHLGIDSQDLLNFLVNEDISDELLDCIEEDKGLSHEMIEEVLITKGLSMVYTSDFKEMAVLNRKYGVNGKMYCTIKGNHCELSSKECFIRLLKEGGEAQMSNENLNADSLFDLGRFVHNRDRAVKLAKSMARGTTGLLNEFDLEFCKNMVTLSELFPENFSSVVGLRLGFAGSGKTHKVLQWINYTPSVKRMFISPRRMLADEVEPQLKGTACQVHTWETALKKIDGTFMEVFVDEIGLYPPGYLTLLQMCAFRKIVKGQSENFLKGKLLELSKTCLNIRCFGDPLQLRYYSAEDTNLLDKTHDIDLMIKTIKHKYLFQGYRFGQWFQELVNMPTRVDESKFSRKFFADISSVKTEDYGLILVAKREDKGVFAGRVPVATVSESQGMTISKRVLICLDQNLFAGGANAAIVAITRSKVGFDFILKGNSLKEVQRMAQKTIWQFIIEGKSIPMERIVNMNPGASFYESPLDVGNSSIQDKASNDLFIMPFINLAEEEVDPEEVVGDVIQPVEWFKCHVPVFDTDPTLAEIFDKVAAKEKREFQSVLGLSNQFLDMEKNGCKIDILPFARQNVFPHHQASDDVTFWAGVQKRIRKSNWRREKSKFEEFESQGKELLQEFISMLPFEFKVNIKEIEDGEKSFLEKRKLKSEKMWANHSERSDIDWKLDHAFLFMKSQYCTKEGKMFTEAKAGQTLACFQHIVLFRFGPMLRAIESAFLRSCGDSYYIHSGKNFFCLDSFVTKNASVFDGFSIESDYTAFDSSQDHVILAFEMALLQYLGVSKEFQLDYLRLKLTLGCRLGSLAIMRFTGEFCTFLFNTFANMLFTQLKYKIDPRRHRILFAGDDMCSLSSLKRRRGERATRLMKSFSLTAVEEVRKFPMFCGWYLSPYGIIKSPKLLWARIKMMSERQLLKECVDNYLFEAIFAYRLGERLYTILKEEDFEYHYLVIRFFVRNSKLLTGLSKSLIFEIGEGIGSKWLSSTSTASSRRSNLQTSKLMLSRPQSFTRMQPFSNQTCLIASKGLNQTSRFPLDLVTASSCLISNCLMTPKLIQSGRKATSTNTYTMESSWLGSKQCCQTLEAWKGESLYMMEPAWIRKEATFARIFSSLSLTVATLVSGQSTVCLPQTQIWPKGLDFVWTLIVHNMNRTLSCLLLTLELHTDASTLQGFWKPKLAIQDGLHRQSAAVKHLNSMRKSRWPSWIADPRCFWKKVHQTCTLKRDCSEVTRLEGHAQFPLKGGQTQGCKKREDLGPSRLELKDLEKMSLEDVLQQARRHRVGVYLWKTHIDPAKELLTVPPPEGFKEGESFEGKELYLLLCNHYCKYLFGNIAVFGSSDKTQFPAVGFDTPPVHYNLTTTPKEGETDEGRKARAGSSGEKTKIWRIDLSNVVPELKTFAATSRQNSLNECTFRKLCEPFADLAREFLHERWSKGLATNIYKKWPKAFEKSPWVAFDFATGLKMNRLTPDEKQVIDRMTKRLFRTEGQKGVFEAGSESNLELEG

SEQ ID NO: 529 - protein, 1962 aa, Citrus leaf blotch virus
MALMSNKTAIESILGNFEKKHVDAIYNAAAQTILSHSEFRNKHFAYSLNSYQKKIASKVGIELYPNGYLPHSHPLSKIFENHLLFDVLPGVVNTSRLVMCSIKESKVLVFKGIRDKSRRQVSDLNALNSLNNSHTSFINRLVASKDVSRYTEEADAFFQSKKGSPELFSRNFIKSLENKEAVFFHDEVHHWTKAQMFSFLKSTKVKRFIFTVVYPPEILKKFANSQNPKVYDFKVDKGRLFFFPDGVKTEAYEQKLNMEWLFSASHLRSGDCVWTVTRHKSIYAHHLFEISIGELVTDSKLFFSDYNSIDMSKIFLDRFRSYEVFPISIEHLYKVYSYLLCLKKPDLESGLAKLRQIIGDDVEIKEFLFFEQFCKRLIERQTSWGLFGHSFFEKLTDMALSSLPNSIARIFPQWKKKNTFEFLFSLGTLVVDVERKVCFEHVLEEWGFEVVITDENAYLDPLSIFAINENFNEDRVDDGYLERIRLPFWNLNDYDLKRKRVNAYNILSYRFEEERKIESAQKGPNKMLQIEWYGIKEFKVDPFISNSITEFTLLEALLGKRIDPKKYSYSKQACTLSNYLTFLCAEGLDGFNLEEHLERRLKAAGHDVSDDEEEELTSAEQAGPIKILADPLGFMKECLEEIPIETEPSLEERGQFSTDYHSEKFEINYNDIFNPHNCMNTHGDEIPTPSDGNCFFSAFTETFEVERPDTLRSDFSDWLMEFNGGSYASLAEMIRPNGVFMEAELIYLFCVFRGVTLIIHDRTHEKENVYAVHRGFEEGHMVHRGNHFVGIETYNISTLTSDPLLGDIPCGFSEEITKFHFRPDHFNCAQFRGRKAAFITKVDADYGHNGMVYPHNSWVPSLEEIIQICGQGDDFNCALINFYEANSSLGFHRDNERVYNDDPILTVCTFGEGRFTIEFKDQVTSFLMTAGSFFLMPKGFQKKARHSVSNEMSRVSITFRKHVRRLNGSPIAIREENYKNTCLINAFSKAMKRSKQAIIAKLKTVNSPFWSRYLSEGNGGSIEDCQSACEALDVTVDLNVNGKCVVLGKGALRISMALRNNHFSVINAAQLMERTFVSHLLEKGNVNVLEGFDAMLSGDVGAAGVNKIQFAANFEFARILANSFLNMTTGICLGKALDNGEKYFLHILKDRVKQIGIDVTMVCGFAGSGKSRKLQSWLHSRKKGNFCVVSPRTNLAADWAFKLELEPNEQRKVSTFEKFIKTDKSKLDLIVIDELTLFPNGYLDLLVYELADVNRHCQIILLFDPLQARYHNKMDESILTFEHDVDRLIGGQNIEYIYSTHRMSRYFNRFFDVPCFNQADRTEEQRLWIFDDVYSIPSICSDRQEPCDVLLVESDLEKKAFSPIINVMTFGESQGLTFNHVCILLSESSAASNEFRWMVALTRARTRFSLCSTFLGGIEEFKVKRKESLITSILQGEKITFNRLNLMLKCNLIRREKENGCRDEVDREERLEGDPFLKPFIFLGQRVEKDEDEVEEVKIREPTCQTHLYITEPNFGLCYNFDFIREKEQREYREDMLVTNQFCDSYDKVHINGKRETPGPLRFKAIYPKHSADDDMTFWMAVRKRLVFREEEENYQRLSRAHLVGGLLYTNFKKKMGLEFTFDQGLLEESINAFEKKKLEKSCGTIKSHSIRSDIDWALNDVFLFMKSQLCTKYEKQFVDAKAGQTLACFQHLILVQFAPWCRYLETQIRNQLPEEIYIHSNKNFDDLNAWVKKFFQRDICVESDYEAFDASQDEYILSFEIHLMKDAHFPQKIIDAYIDLKCKLGCKLGHFSIMRFTGEFCTFLFNTLANMAFTMCRYEWRRGQPIAFAGDDMCALNNLAVCHDFDDLFELISLKAKVERTETPMFCGWRLTPYGIVKEPELVYNRFQVAIEEGKVLECLENYAIEVSYAYSLSERLYEVLKSERQVQYHQAVVRFIVTHIDKLKTKVRDLFLEQSSDEDI

SEQ ID NO: 530 - protein, 2195 aa, Soybean latent spherical virus
MSFHCPSSTCLGYTQSFSRRDMREQGDRCPHAMCGALLVKKVPTLSPQGARPVVSKTTVVVPPQATEEVLYYGCAPRPAFLEAVLAAPKLKMAPPVVDAMEVAYLRGVAAMEAEEKKLLRKEKAAVVARAKARRAARKAAKKQVAEMKATVALKLATRQKTARLSAAKRAMKAKRKAAKEAARLALEERRAAGLTRKSAFRRSLKKKATKMAGRKVPKTSTSTFPKVESFSCFPSSPLPAFIREEQPWVAVNTPCPHPEGFDLAVDPAFVAPIVGPIVSVPFMAPVVKAFNSLVEILAAINYEAAVDLRAYILEIASYENFFALRRIFVGKALSWMALILPLYPYAGIFDTYLPLDMVEDKNCDAYLASLQQTAVMVLEVTQGPMDAHSIFDIVRSVGSKVASIKDKVVGCIVEKSAALLDTVIDTAKGMFFGVLGPYLARAQKIGEEIKKFWDNCVEWATKLWQGAHIALQALGIYAVWAIVAMVLVGVMYILETILICLGVMSGHGVLVVALTGAVMTFLGFTVFQMGREYIHFLTALRQIIFLAVIPQGGLTQVNIMDSSVDVTEPHSLLDTAMAPVHFLETVASGLTFFSSTSVTVLGKLGNSLEGIRKGFNCLRDFTSVLLEQFGNAFEYISGKRTSFFRDLACAVKVDIARWTQDARETIEYFEISGSLDRYEYYRARELIYQGQDLIDTANKARSSHTSVKFLRTIGKLVEELKEIRAKCARSLKFPGWRRQPFWVYCFGESQCGKSTLANYLMPLLMSHMGWDPQDVYSKDPVDGYWSGYYQQKGLKINDLSAVNSKDVAPLEQQLIPLISTEEKMVSSAEIEGKGMQFASEIVVSSSNFNDAPTGAEILDADAYRQRRKVLMRCRRAAEWVHNADGTRTEKLDAEGKIVYKPYDPSNALSCTEVQWIHPVSFTALPGPCGQWHLAEFTIPMVKEAMDAHFLQEETKMASWKSSLGMKSQTARKMGSYLQDMIKGIGNFVTLKGAKDSDPRYLLVAVDGKCYALDQQGKATPYEDCDVVEEIERLTLLQYRSYFADLVMEHADNTYYQDSFHSSTVRDFLLALMKDGSTVLSVDSLGSSTQDIHKELWAELGLSEKIFLRVSQIARNQLRDAPHFKEDVAHNFLETMRHLRDAIVDRKEQILLFFAAVALVGLFSWGFLSLIKQFACGSLGFGAGIALREQIAHSSVMSSGSVTSAFVARNMPVVWGKAARYATAHSSKEEVGANFDYFEDASAHLLARVVGSSGQSETCLLFGHQAIALCAHQLRLFPDNDRVTIHYFSKERRPVCFSFTWHYINAIEWPDCEVIVYRDAQLTPLPVYSDDNYLCGEQTLPTVLTITGLSIKKKKFFDDSTLCPSEKILDGEMPIVRSWKDTASLRTQVQTILSETHRRDINRYYTSSYPSGKHDSGGIITAVINGKRKVIGMHCAGAQNGKIYVSTIGLLPTRNINDAHSAADYFVPSIGREEKGFCKIGWIADPSKRPHAATKTALAPVPKELALPLPEGVSVKIPSILSAADPRLRDEVNPEFKDYDPLRVGMDKFANPMDPLDDEVLQRVCEDIYETWYDCLPILDDEKVFLQKTSLEVALNGIPGEACYEAMRLDTSEGYPFVLERKPGESGKLSYVHIDENGVRSLIPGTSVFRDYHELSASILTQVPVLNCIECPKDELLKPSKVLEKPGTRLFDVLPFTHNILLREYFLNFCVFLQQNRVHLPCSVGVNPYSREWTWLFDRLAAKSDKALNCDYSKFDGLISHQVYMHMVATINRLFRDGEEANCARKNLFLMFTSRRSICYDQVYMVKGGMPSGCALTVIINSILNEILVRYVYRITVPMPAKNYFNKYVELVVYGDDNLIAIHDDVVSFFDGPIIKEKLAEVGVTITDGTDKSSPTLLRKPLESLDFLKRGFRKIEGGMYSCPLDKGSLYSRLYYSAGGKGGLFQLDILHDNVKSFLEELTHHADHYEEFQRVRSFYIKRIPSWSATLPTYATCLNMMEGQRNSATPWQPHKFIETRPSGCETKMMAGQDNHAQKICVTERIIICGEKYTPPILETSFVVSIDNPLYIGERGEYVKTEFGSGMGRLPTDAWIKAFSSPKKHPQLFEAYKMGATIYFRSCMPYLNAWCAVCKFALAHGIDQSSIIAMYESCKPRGAGDIAPLVAVKAYTKFVNRPVFKFKETVHKEVLEAHNSVRVA

SEQ ID NO: 531 - DNA, 10749 bp, Citrus tristeza virus
  source 1..10749: mol_type = other DNA
atgtcgaaactcagaggaagcttctggtcttcggccatcgctgttaacagcgattacacgatatcgcgcatctggcgcaaacttaacaccatagtagtcctgcactactttggttttgttagaatcaccaaggtgattcgtgacaaatcggctgatatgccgatagtccctttacggaaatctgtatttccgttttctgttcgcgcggctgtcacgagcttcgtgctgctgggcgtcctcttgacgctccgcattcagggtgcctctgtggccttcccgttatcaacgcatctggcgttgttcgtccccgctctgttcgcgggtttttcgaggttttctctgtgcaaacctccgctcacctctgccgctaagaggtccctccgtcaggcaaagcgggaatctgtttccctttctagccgggcctcttctcgcttctctagggaagtccctcgcggcacacgttcaagacttcacagacgtgtggtgagacgagctgacactgccccagttgagagtccccaagacaagcctacccgacgaaacagccgacttggtaagacttctcacctcccttacgtgggggaggcagcgttggatgatatccttcgctggatcgaagaggttaatcctcatccctcgatggtcgctattccagtgcccatcacttttggaaccatgcctgcaacggcttggtgttcccactctgaagccgcagttttgcgtgccgccttgactatcacgcggctgaaactgatttctccactcaggagaaacacgtacggtacgtctataatgacgtatcttctgccactaaccgtccccgtacggtttctccccgcaagtgcgtccatttttcccagtaaatctaaactgggcgttgaggtcccctctggtagggaccttcacactgcgttcgtgagatcttctcacgcgagcgctttcttctctgacgcggttcgcgcttcgtttgttccgtccagcgcggaacaattttttcacttccgtcgtcagcggacgcatgttcttgctattacagacccggtcctgtgtggtacggtgtctgttttaatgtcggacggtgttaacacagcacgtctcgacgttgttgctccggcgtactatgcgtacgctgaatctttgggcgccagagtgcgctttttgtgggagtcgtccgacgtggacgacgctaaagttcgtgacggtcaatgttatgtccgtcatgtgttcgacgtggctctctactttgggagacgcgccgacctttccgtgcgtagagcgctgggtatgtaccccacagtgggtgcactaaaggcttatcttgttcgcgaatacggtcgcgactctcttaaggttcctatgcgtgggacctacacttttggcagtgtgtttcactgcttgtcgctaaatcttcaagtcgacctgcgatctattcctaaccatcatttagttggtgggacgtctgcccacgtcttaattgggcaggttcgagtcagtgttcctggctcgattgttaaaccttcacgttcggccgttcgtaggcgtaatagacgcatgcgacgtgatggttttctcggtagttccggttcttcttcttctgcgggggagtcgactcgctgttcggactgctcttctcctcgcggtttaccttctccttccgttttaaaaccttccctaggtcggatcccgagtatagatcggcggttccggtttcctgcgggtacgcagttgcgcgtctccgtacctaggcgggtcgatgaccatgtttacgtgtcgactggtagcaacttcgatgagttgtgccatgcagttttgacacgtatgtcaaaaggtacaactctagaaatccttttacactcgattcgagagcggaagggactacttggttttgcggcgtgcttccgttgggggtcttcacacgtgtttgtaaagcgtggcaactttactgcccgatttcctatttcggcggtcaggtatgagaatcagtatgccgcggttatgatggatgtggggactagttgggttccgaagggctacgttcccgatgttgatgttgtgaaacgtcggagaagtcgtaatcgtcgttttcctctttcccatcgtgcggtggatcagtcggtccccgcgttacagtcgagtcctgtcgaggttgcttcggtttcgagtgataagccttcatcgtcgcagaaggcttcttcaccttctacttcttcttcttcttcttttaactcgacaaggagttcagactgggtgaatgtcggtttctctcatcgaactactaataaggttcgtgaaccgcgttatgctggtcatcgtaggatcggaaattttactttcccgaggggcacagtgtacaacacgcctgtcgatgagcgcgcctataaacgtgttcttagattgcgagataccacagcctgttcctttctccgtatactgctagctcgtttgtcgggttacagacctttaagtgacgagttctttaacaagtgtgtcacttcccggtttgtcgcgtgcattgaacctgtggaatcaggtctcgttaaggtgcatttccgttctgatgttttccgtgcctctttcccgtttgacggtcaacctatacaccccgccacggctttgacattggaagtggtggtctcttgggattggatggttacggcttttcagaatcccttgaaggatggatattgctacattcgccatttcgccgaagttagtttgagcatggggcgaattttcttcaggagggacgtcgacttgggacctttcccatacgttttcgaagtgcaacaccgtcttgaaaggttgtacgggaaagctgcgttaagatacggtgttaggggtcaatattcagccccgcgctgttttcactgttgctacaacgattcaccgagaccgatggcgtcctttaatgggtaccataagatgggtggtgaagataactccctgataatcacagacaccgacaggttgcgtgctgtggggagtgcctatgaaaaagtgaagagaaacataccagattcgttattggttcggtctgtagaaaaggaccttatagagtttaatcagactctagtcgacatgcatcgatccagaccgggcgttgtcgtacctttccaaatgagtgagaatcagcaagtgatgcttactagggcgtacccggaatttaatattaattttattcattccgtacattccgatcatccggtggcagcaggttctagggcgttggagaatcatctcgttcgtaaacacgctggtaccgattattcggatgtggggggttgtccgctgtttcatttacgtgcgggtcactccggcgttcacgtttgtagaccggtgtacgatgttaaagacgctcatcgtagagtagtccgtcatcaccaacttagtaaggtttcgctagatcagagtgacggtgttaaacaagttggctggaccgtaaacacgaattctgtatgcggtaacattttgggagagtgttatcatgcatcggaggcgatggttatggttcaagtttatgacgtaccgctacgtgagttgtgtagggctatgataaacaagaaaacttccgtgtgttatatgaccatggttacacctggtgagttgttggacgcccgcgagtccttttttattaaggacttggattgttcggttgagttagatcccattgcagacagggttgtttactgtttcaacaattctgcgtatacacacacgtactccactatatgtgagtgtatgcgaactccttgcttggtagtggacgggtttttgtttactatcgaaatggtatcgctcaggtgtagcgttaattactattgtatcaccaagtcgtcggtctgtccgagaattagtgagactaagcggttgcgctaccgtcggtgtgatagcgacttgattagaatcaaaattccccggtactccagtaagactcgtagttgtttacctgggtgttactatttgtacttggacgccaagtttgtaagtcgcgtgtacgagtacgtggtcaataactgcgttgtggtgaacgcgaaaacttttgagtggacttggaattacatcaaatcttgcaagtcgagagtggtgatcagcgggaagattatacaccgagacgaaccaatcgctttagagtacttagatgggttttctgcggttatgctgtccgctggcgtgaagggtaggcaaaacgcggacgtttctagacgcttagccgctttttcgggtgaaacttcgattttcgagttagtggggtttgctatatccgagaagtgccgcgacttgttcttgggtattcaggacgctgtggaaagatgcgtgaagtcgtacctcaggaattcgtttaatatgagtttcgtggacttgtccgaccccttacttacgattagcgaatattcagaattggacgttcctatcgacttaccgggtttcggtggaatagtggacggtaacgaaactagacttatggaagacggtgttaaatcggctttattacgtaaagcggttcaagccgaggctcagttgagtcttaagagaggcaatacttccgaaatcgttccgtgtgatgacgatgacgactcgaacggtgatgattcgcgtgtttcgctcgatacggactggtggttcgtccttcggggtggtagttctggcgggttgcgagctggagccgccccttctttgtttaggtgtttactcaggaaattgggtgggggtttatgtttggcaaagaaagtgttggaactgttagtcaagcgggtggttgaatcgttttctcgtttgaagcggaaaaccgctcgtttaacgtccttcgctaatttgttgcttgcgaggctctcttgcgggtttttcgatgacactgttttttctgcggtctgggaaatagcgatcaacctgaccaggatcgtcgatggagtagtcaagacaaaactggggtgctttcgtaatttatttcgattgattcccaagttatacgctggttgtaaggacgttgtgaaggacgttagtaacgcttacaggtcggttgtctcgttttccgctgaggttttgggtaagagttactctaaactttgtcagttttgcttggaaatatttgacatcgggcttattgaggtttctgctcgtaatttgggactggaaacatgcgtttcaatagcactagctatttttgatgtgttgattacttttcctttggggagcgttagttttcccgtcgtttgcgctagggttttcggtcgtctcgctatggaagtgggatcgaactttttgtttaagaaagttttcggtaaacccgaaactcttggtgaagatactttccgtaggactgtgagtatggttttgaggcccaaagcgtttgacaagctttccgtggatgcgaaaggtttagttaggtgctctggtgttattcctggagtgttaaggataatactatcttccttgttttccgaagatgacgcttgggtgggttatagtaaacatgaagtttcttcccttcctattgttaccttttgtgtgaagagattgtcttattctctggagcggtgtaaggaagcgtgtgtcgcatttattgttgactctgctaagaagattttgaaatctttaacttcagagttcaacgaatccattcaaaactccgacttgaccagtggtgctaagtccttgtacgggcacgtgagctcgatactttacacctctagtggtgtgattaataaagcaggaagcgccgtcgctactgttaaagcggtcgggagtgatatcagtggtcgtgtgaaacgtatgcgaccccgattttctctgtcccgtcactttgacgagcagactagtgagtactactctgctagcgattgttccgaactagatgagtcgttgtttagtgaaacgcctggtcttcgtggaaacgccaggtgtagagatttgtttcgtatcgtgtctagacgcgcggtagcgtgttgtgagtacgtgacaattcttttgaaacggctagcgtcgcgtgccggtgaatactcctactcgtatgtgatggatacgctcgtgagattgtatgtggcgaccgatgatgttgttagacggtgcaggtcctttacgttcgactgtactgataaagcatctaatttcgtcaccgggtttcttagttggcgcagcttacgttctggtgcgtactctgcaactccagggttgggtggtggtagtagaggtttaacgtcgttttctcacaccggtggattcacgcgcgttatcggcgctcttgggaacaccttatcggtggtgtttgatgaggaattcttcagaactttgctgcatcggttgagggcagatgttgtggttttactggtggagttcttgaaaaaccttcccgtttgtttgttttcaatatacacttttattgaatgtcggggtaggatctttcctttaagagagttcctatggggtttttgtcgtttcgtttgggatgttatcgaggggttgtccatcaatacttatcaatacctctctgctgtcgctgagaaagtgtatcgaggtgcctttaatcgtcgatttaacgaagaggatgagaggacgcttcgagtgatcacggaagcagagggaagaatcgaatttttgcgagttgttctcgcggaaatggaaaggttccgtgctgcgtcgaacgaggtttcttcgtcgaggtcgtctgatagtccttcattcccacctacttacggtgaaattgaggagttaaatgatgattcctccgatagtgcgctagtgataggcgtcgacaacggtaccggccgcactatcgttgacggtgagaccgattctgcgtccggtagcgatagtgacgtttctatcccgttggatcgcgattttgaacaaatcgggcgtcttggcggaaacggtaacgtcgatgtcgttcggctgggtttgaaattcgttctgaagttgttacgcaacctattcgatgctagaagttttaaagtgttgtatgggttgttacttcaaacccttttttatggtggttcggtaaataaatttgtgtgtcgtctggtctttagtcttgggacttgcttacctttcgagttactccgatttgcgtgttcagcgaggcggttgttgaagagtttggcatcatttgtttaccagactaaccttttcagcgaagttatggtggagcatttgtttagcgtttcccgactgctttatgattcccggtacttcgcgactgtgttttcggaattggagagacttaacttctatttagactatttcctttcgctcccgaagagatatctattccctaattctagggctcgtagttgtgctagggttccggttcccgtgattaggaccgaaggagtggcaccagtccgtgagagatcactaaatgacatactggactctttagactctttaaaggtgtcggacctcaaagggaagtcgacgttcgttgatgatggggagtcggattccggtagtgaacattcgggtagttcgatttcgttcggttccgtcaacgaagaagttttaaatgcggtaaatggtgacagcgtttgcgaaaaagccccgttgatgaagcatgttaccgcacttagcaggttggaacgccaccctagtggtcgtaaagacattcctgtttctaggaaaacttttgtgcgtggtgaatcttcgggtgtgaaatcgaaggtgagtatgtgcgattacttggtgaccttgaattcttcgtttggcacagtgcctgacatgtaccctgttgcgcgtgacataacgtataagaaactgactaacgccatgcgcgaattctattactcgcaaaaaataaccttgtacgaacttcacgggaagttgagttcctattgggacgagttgaaggtcgcaggtttcgatagaaagttaacgagaatggatttggacgatgatgtctatgttgttgactttaatcggaaattgttggtggggagaaacggatctcatccgtttcgtaatacgttaaagtcctattgttttatgttttgtaacgatgggttggttccttgcccgcgttctcagaaatatgattatgctttgatttctaatcaaacgtcttttgttgccgcgaattcgttcttacgtgccgtggatggtaaggatttgacttttaccaatgaggaacatagccttatcgtttatgaagctcctcccggtggtggtaagactcattctttggtgaattcgtacgcggattattgcgttaaagtatcttgtttagtagtgaccgctaacaagaattctcaaaccgagatatctcagcgcatatctaatgaattgatgggcaggaagctagctgctaagtatgttaccgatgcagcttccagagtgttcactgtagattcttacttaatgaatcacttgcgacttacgactcaactgctgtttatcgacgagtgcttcatggttcatgctggggcaattggagccgtggttgagttcacgtcttgtaaagcggtggttttctttggtgatagtaagcaaatccattacattcaccgaaacgatctcggggtttcctttgttgcagatattgatgcgtttattcaaccggaacatcgtatttacggcgaagtgtcctataggtgtccttgggacatttgcgagtggctttccgagttttacccgcgacacgtagctactgctaatgtagggagtattgggaagtcgagtgtgtcaatagaggaaatcaatgggtgcgatgacgtaccttacgacaaggcggcgaagtacattgtgtacactcaggctgaaaagaacgatttgcaaaaacacctcggtcgcttaaccgtgggtcggaacaaggtagtaccaattgtaaataccgttcatgaggtacaaggagagacctataaaagggtacgtctggtgaggtttaagtatcaggaggataccccgttctcttcaaagaatcatattgtggttgctttgactagacatgttgattctttggtttattccgtacttactagtaggaggtacgacgatactgcgactaacatagatagggcgaaggaaatttttgacaaatttcgttcgtcgaatcactcgtacggttcgtcatcgttagagtggtaccttgaaaagtatcctaccgaatataagggtagtaaagcatcctctgctccgataagttgcattaacgaatttcttaatgaggtcgtcgttggttcttctgtcgtgcagttgggtgatgtgtctgaagaactaagttcacgtccctttgaatcgggttgtgataatgttactgtagagacaccgcccctcctgactcgggtaacttacacgaaccggctcgcgttcggcgtagtaaggtcacaagcaattcctccaagaaaagcgtcactgcaagaaaaccttctgtcgtacgaaagtcgtaattataactttatcaagacggaacggtttgttggaccaagcgaatttggtagggcgatggctgctgctgttatcgaacgttgtttcaaaatggaagagatggctaagataaggtgtgatattatatcccttactgaagctaacattttaaaatggctcgataagcgcactccctgtcaaataaaggccgtacacggggagttgaaacttcccttttcggtggaggagcaaatttccaacttcaaactgatggttaaacgtgatgctaaggtaaaacttgacgattcaagtctatctaaacatcccgctgctcagaacatcatgtttcataagaagtttatcaatgccatattttccccgtgtttcgacgagttcaaaaatagagtgttgtcctcgcttaatgacaatatcgtgttctttactgagatgacgaacgctgggttagcggaaattatcagaagaatcattggtgacgacgacaacttatttgttggggaagtggatttcagtaagttcgataagtctcaggatttgttcattaaagagtacgaacgtacgttgtattccgagtttgggttcgataccgaacttctcgatgtgtggatggaaggtgagtatcgcgctagagccaccacgctggacggtcagctgagtttttcagttgatggtcagcgtcgttctggaggttcaaacacttggattgggaattccttggttactctaggtatcctttcgttatattacgacgtttcgaagtttgacttactcctcgtttctggagacgattctttaatttattcgagtgaaaagataagcaacttttcttccgaaatttgcttagaaacaggttttgagactaagtttatgtctccgagcgtgccatatttttgctcaaagtttgtggttcagaccggtaacaaaacgtgttttgtgcctgacccttataaattattagtaaagttgggggctccacaaaataagttaaccgatgtcgagttatttgagttgttcacttcttttaaggacatgacgcaggactttggtgatcaagtggttttggagaagctgaagttgctagtcgaagctaagtacggtttcgctagtgggaccactatgccagcattgtgcgctattcattgtgtgcgatcgaactttctgtcctttgagaggttatttcctttcattaggggttggtatgttgttgacgctctaaaactcagacagcttaggaaactcactaatttgatctgtgaacgtgtagtttacgacaatcgggtgagttatttttcgtacttcgataacccgttcactaaacctgacgctaacgacgataacgtggacgacctcggacaagcgggtgaattagcaaccggctga

SEQ ID NO: 532 - DNA, 3171 bp, Spinach latent virus
  source 1..3171: mol_type = other DNA
atggatacaattgttcaaatgaaagtattgtgttacgagtcgatgatattattaatgataccttcagacgtaaacgcaccaaggccggaaactgccattggtaggttgatttccgatgccgctgtttcaggtgttttgcgacaatgcgatttcactgcagcggaagcctctcaatgttttgttccaattatcaccggaagatcagaatgcattgagacgcgattttctggaagagaaatacagtttcgcaatttttcgtattcctcacaatcattcgctgctgcgcatcgagtgtgtgaagcggattatatttatagtcgattccagacgagaaataccacgatcattgatattggaggaaatttttgcacccatagtaaaatgggtagagataatgttcattcatgttgcccgatattggacgttcgtgatggagctcggtatactgacaggttcatgtctgtggcgggggctttggaaacccagcctgaccgtgagctcagactgaactattgttccaataaatttgaagattgtgatgtttccgcaccatgggcgatggcgattcactcgatttcagatataccgatcacaagtgttgttaagcattgtttccgcagaggggtcaagaaattgatagcctctgtgatgatggatcccatgatgcttgttgcttctcaaggttttatgcccagattgaatgttcaatgggaaattgaacctgatgaggagaacaaaggttcccggcgaatttcttttcatttcgtcgatgctcctggattgtcatatactcataactatgacgtgcttatgcagtacatgacttgtaatcaagtcataatcagtgggaaagccgcgtatcgagttgagcgcgttgcagatctgtctggtgtttttattgttgagattaaccctggcggcaactgctggaatgaaagactggatctagttcccatgcgagatgtttcatgcgcgtggatgacttcgttaaaacgtaagaccttagtgcgggttgccatcccgcaatatattcattcatgggaagttaagtatgtgattgccgacactgattttgttagaagagttgctgaagtgtcgttccgtcagtataaaccagaaacaccattacaggatttggtgaaatctgttgcgacgatgatttcctctgcttctaaccattgcattatcaatggtgtcaccatgcaaactggtacaccgttggccattgaggactatgtcccaatggcggtgacttttgttgccttcgctaaatcaagatatgattcgataaaggaaggcatgaaaatggttaggcagagaggtactaatatcgcggatcctaatgatcattatgattatgagaaagatggatcggatgttaagagtttttcaaatcacataattcccatgaagaataccatcaagtctctgtttttccccatgaaagtgaagatgaatgataattctatgctcatttatagtcaaggaatcttgtcaactgttgttgatgagataaaaacactttttggatgggatgtttgggacactgacgatgcggtaatacagtctctgccctctttttataagatggaggatgtttttcaagttacgtctgaccactattgtttatcacatacattatctgtggattggtggttggagggactgtatgattcttaccatgacatgcgtgttgcgcataaaaagaaacttgatgaagaagaatctcggaagaccaaggtcgagaatgccttattgaaaattgctgaggttttggagaaacctgatgttagcgatggtcttaaagctctttcagaattgcccataatatcatcattattggagaagaagagcgaagaaatcgttacaaaacctcaatgcagggatactgaaaaaccccatattaatccctatgctgatgcaatcaaagaggcgcaggcctattacgaagagcttgaggtcgtaaatactcgcaatttgagaggtgttggtgattacctcttttggcgaaagaagtcgaactatgccagcgtttggggcgctgatgaatcgagagtggttcttgaacctatggcaaggaagttttactctcgagatagaaatgtttccatacccgagtatgagcgaggtatgacggttgatggtttcgtctccattaaatgggtggacggaaacattactgaggacacgtggaagtgtctttccaaatacgcagttgttttgctcgactcttcttgcgtgtttgatgccggttcacgtattatgccaggtctgaaaaaggcattggtaatggatgcaaatttcaaaatcgtgatcgaggatggtgtggcaggatgtgggaaaacaacatctctcctcaagcaagctaagccggattcggatttgttgttagctgccaaccgtgagactgcaaatgacgcaaaagccagcggcgttattcctaaagcgcttgaataccgagtgagaactgtggattcttacttgatgttgagaacgtggttcacagccgagagattgctcgttgatgaatgtttcttggtccatgctggcttggtctatgcagctgccaccttggcacgagtgaaggaagtaatagcttttggtgatacaaagcagattccattcgtgtctcgtataccaactgtcaaactcagacacgcgtctgttgttgggacgttgaagccaagaacaattacctacagatgccctagggacgtgacggcagtccttagtgagaaattttatggtactaaggttaagacgtttaatcttgttaaacagtctttggaattgaaaaacatagattctagtaccgaaatacctgtagaaaaggatacgctatatatagcgcatacccaagctgataaacatgctttgatgcgtttacctgggatgaatggtatagaagtgttaactactcatgaagcccaagggaaaacaagagaccatgtgatacttgtgcgtttaagtaaaactaccaatttattatattccgggaaaatgcccgatgctggtggttcgcacaatcttgttggtctgtcccggcataagaaatctttgagatattttagtgtctttgccgatgatccagacgatcaaattgcgactggaattcgctggtccaaaacattggatgagcaagagttagcagcttatagagctgctggttag

SEQ ID NO: 533 - DNA, 2394 bp, Spinach latent virus
  source 1..2394: mol_type = other DNA
atggattcttaccacttcttatctcagttgtgtgacttgaatgttctgactcatgcgctttatgttaatcaagtgtttgagattgtggatcagtccacaactagttatatgcagatgtggctttattcccgtgttattgtcccagttttgaaatatcatctcagtggagatattatattggataaattgcacgatgtgttccttggaacctttcgttcaatgatggtgccgatgattatgttgaaccgactttcattcgtcgtgaagatgacgacgatgaaccaccaccggaaagcgtatttgccgcttgaagaaagggaaaaaattcatgctgcgacgtttcttggtcatgatcattgggcaagcgttacttcgggatcatctttttatgatgatctcgaaattctcgctgatgagaccgtgaacgatgatttgcattttgataaagaatcttccatgccagatgagtatcagatcatgtggaatgatggtacaattgattccgtttggtctagtcagtttgaatgcgaagaaccaccgaaaccgaaatttataccacgcccttctgataaggtgtgtgatccagtggttattcaagatgccgtgaacgatatattcccatttcatcatgagatggatgatcgatatttccagacgttagtggagacacaggatatttcccttgaggtttcgaagtgttggatagatgcctccaatttcagagattttgttaagggtccaaattcttatgttgagcctgtgtttcaaaccggtgccactagtaagagagtgcatactcaacgtgaggctcttttagctgtgaagaaaaggaatatgaatataccggaattgcaatccactttcgatcttgatgcggaagtcaacacgtgtttcaaacggtttctcacacacgttgttgatttgccacgattaaaaaggttgcaacctatgactggtgttgaggtggaatacttcaatcaatacttgcttgggaagaatccacctgtgaaggaatatcaaggtcccttgacattgactgcacttgataaatatatgcatatggtcaagacgattgtgaaaccagtcgaggacaattcgttgaagcatgagcgacctttgtgtgccactattacctatcataagaagggtatagtgatgcaggcctcacctcggtttttgagtgctatgtcaagattggtttatgtcttgaaatcaaaaatccatattcccagtggtaagtggcatcaacttttcacgctggatgctggaaaatccgatgccgtaaaatggtttaaagaggtggatttttcaaagtttgacaagtctcagggcgagttacatcacaaagtgcaggagaagatatttaatgctttaaagttacctcccggatttgttgagatgtggttttccgcccatgagcgatcacacattgtggacagagaagcagggattggattttccgttgattatcaacggagaacaggagatgccaatacgtatttgggtaacactttggttactttgatttgtttggctagagtgtatgatttatgcaatcccaatattacctttgtcatcgcttcgggtgatgattctttaattggaagcgtcgaagaattaccgcgcggaccaggagaatttatttacaaccctgttaattttgaagcgaaattccctcataatcaaccatttatatggctcaaagttttagtaagtgttgatcttgaggatggtggaagagaagtgatcgctgttccaaaccctgcgaagttgttaattggtatgggaagacgagactgtcaataccaagctcttgatgatttgtatcaatcatggcttgatgtgatatattattttagagatgctcgcgtgtgtgaaaaagttgctgatttgtgcgcatatagacagacgcgaagaagctctatgtatttattaagcgctctgttgagcttgcctagttgttttgctaataagaagaaatttaagtggctctgttatcgtttaagagagcaagggtgtctgaagaaggatatttatcctgtagcaaaacctataagtgcccataatataaggaaagaagattcaaatggatgcgatgttaatcaaggaacagatgattcgttctcacggaaaaagaatcgtggatgctgggagtatgtcccaaagatgttgcagactgatgtgtctgttcctgttactgataaatctttccacagtaacagaggctcgtcggtttccccaaccgattgcggtgatggagggtgctccagatccgccagctcgattggtagtaaaaataccaaacctcgccatagatttcgagctgcaggagttcaccaacccagcggtcgtgatccagaccgtataccgccgaatcatcgacgaagtgcctaa

SEQ ID NO: 534 - DNA, 2364 bp, Olive latent virus 2
  source 1..2364: mol_type = other DNA
atggccggagtactttatgatgaggagtacgttccccaggaaccggattacttgtattgcccgtacgagtgggagggtgaagatcctacccaatgcgatgcaaatgttccgtccgtcagctaccttgtggaggctgtaaaaaaatcctttactgagggtaaccacgatatgctgatttcttgcgagtcgtaccacgccgagtgttgcgagggtcccttgatgaacaagggtttgaccctctcgacttactttatgagttatccgggcatttcattacctgcgttcggcggtggtgtgattcatgtcacttcagctcgcgtctgcatgcaagctttttatgccgtgaccccaggaaggtgtagttgttcgtgtggtacgcaattcatctatcgtgccaaaggtggaactggtctaacatttgacgccacgaacactatttctagtgcctttaagttcgaagacgggaaagtgaaatggttaacagaagacctaggcttggcattattggctggttgtttcttgaaatacgtgccaatacctcatgagattgaaattaagatcgaaagaaaggtcgagcccgtgtctgctctggatttttgggaaccagaaggattgatttctgacgtacatttcgtacatccgcaagagagagccttggctcctgagcctccaatggatgtagagatggtgagattagtccgtacggaattgtttgaacactttaatcccacccttcttctgaacgctcggtcggatttttccggtgagaaactgaaagaggttgagttgccacgagctcaatcggaacccttagtccctagggtctgtctcccgcgaggtgatgacgctttaattgatcagtttttcatagacaaggcacccgagcattttaatcgtgaacctgccacagatcaatggcaggtggaatctgatgactttactgtggatttccccacccaagtgcgattacgcgaacgggacgaagattggttcagaaggaaacccgatttcgctgtgtcgtccattcgtacaggtctcgagatgcctcgaattgctacaaagaaggaaatgttaatggcattctcgaagagaaacgttggagctcctcagatggtagaggtacctcaggagatccacgtgaagaggttggctgataggttcttccggacattcttgaaagaaggcggctgggataagggggatggtcattattgggatgattttttccatagaaagggtcgaaaggtcttttcattggagaattgttacgatgaccccttgtcctcatacttagttatgctgaagtccgctgggaaattctctctagatctgaactttccggttcgatcggtaccccaaaccattacttatcatgagaagtgggttaccgaggttttttcccccatgtttctgcaggtgatggcaagatttttctctcgtctgcaagattgggttgttgttccggctggtccgatggctgacttctcccgtgtttggcctagctttgaggggaagtgtttaacagaaattgatctgagtaaatttgataaatctcaaggtaagctgttgcatgatgtgcagagggagattttcctccgtctgggtttcccacccatttggtgtgattggtggtttaaattccacgagtcttcctatttaaatgataagaaccttggtatagctttctcagtagattaccaacgtagaacaggcaatactgccacttactttgggaacacgttggtaacaatgattatgatggccgaagtgtatgaacttgattctctccctttctgtggtttgttttcgggtgatgacaacttgatcgtgactgatcgacctcttgaaggtcgagtttcgttattcccgaacatgttcaacatggaggccaaggtgatgcgtccgggtcagaattacatgtgtagcaaatacctttgcactgtagacggtcgcgtaacccctgtccctgatccttttaagttgctgaagaaagctggtgcctcgtgtcctttggagcaccttgatgacttttacgaatcgtttctggattataccaaatacctggtgagggatgaagttagaacattaatacccaggttgatggcccacaggtatcaagtctcgatggatgaagctggagttgctcttgatcagattatgagctggcgaaagtcaaagactcaattctttaagcatttccagtacaggaaaccaatcaaggactcgctcgaggctgtgaaatccgacttcctttctgctttcggaaaagtagatgatcgaataagagtttggcgcgggcgtcgaaccaatcataagaaggaggtcgatgctttaaaggtcccattggtgagttttagggagtga

SEQ ID NO: 535 - DNA, 4950 bp, Citrus yellow vein clearing virus
  source 1..4950: mol_type = other DNA
atggccactattaggggtgccatcgaacgcattacagacaccaccgtacgcactacacttcaagaggaggcatgccgccaaatacgcgctgaacttaaaaacgtcgaacacatcaaccgttacgctatacagcctgacgccgccgacgcactcgaacacctaggcattggttctaaccccttctctgtggcactgcacacacacggtgcctgcaaagcgattgagaaccaattactctatgtagttggtaccttactcccaaaagaacgtgtcaccatgctcttccttaagaaaagcaagctcaacatcatgaaacgctgccctaaattccaagacatcttcctgaaccaacatattgaaccacgcgacgtttctaggtactgcgactttaacgtccaatccacctccaccagcatacccacacgaacggcttacatcagtgacacactccactttatggaccgtagagacctagtccgactattcctaaacagcccaaatctagagactctctacgccaccattgttctcccagtcgaggctgcttacaaacaaccgagccgctacccagagatataccagattaactatgacttcgacggtttccagtacatacctggaggccatgggggcggcgcctaccaccacgagttcgaacagctgcaatggttagacactggccatatccactggcgtgggcccgactgtaaagagattcgcatgacaattaccgcccaaatgctcgaaagcttaggtgcgaatcatcttttctgcttcaaacgtgggaaactactcaccccacgtgtacgcactttcggccgagatacccaagtgctcttgcccaaaatcttccgcccggccgacaaaaactttaacagggcaataccactaaccctagctaacaaactactcctgtacgctaaatccattaacacagtgaccttccgcgacgtcgttgccaagacacgccaacttatgaaggacaaggagcttgaaacatacaccggcaacgacctgttgcatatggccaactatttcttcgctgttggagcactgtcaggagttaactcctatgaccaattgcttggcctatccgcctgggaagcctgcaccgtccgtatcaagaacaccataacaaatctctgggaaaagattgccggaaagaaagagttcggcaagctattggaggcccttgagtgggaaacattcacatactcacgtcaagtgaccgaattcaccgttacgggactgcccgccctgctccccctcccagacatctcagaccaagaagagattttcgcccagcaggacgagttagacaaaatcactgccggcgctaccaagatacggactattgacattatgcggggacaagctaaccgcgctaacccaaaaactccgatcaactcaacaccggcccagggaccccaactgcccgatacccccgacccaatcgaccaagctgcctccaaagacctcgtcaccaagcttcagaaaaacaaacgcatttacatccaagacgacgggccggaataccttatgggacacatggctgaagtccctgcctggtatcttgaacaagatgataccaccactagactcaaaaaccgctgcgcttggttcttcggcccacccacctacagatatgggcacaacgacattgagtacaccaccatagaatactacccttgggtcgagcgtattggagccattttcggcaagtacaacacctgtcttgctcaaacttacgacgccggagcccgtattggataccacgctgacgacgaagactgctacgaccccgacgtcaccgtggtcaccatcaacctcactgggaacgccaccttcctgctcaagaccccaaccggcactaggacctggaaacttaaacctggtgacttcattatcatgaaacccggtgcccaaaggtgcacaaaacatgccattagagattgcacaactaaccgcacatccttaaccttcagatggcaggcccgcacttgccccactaacctcagaaagatcactaacctacccaaagccaccaaccaaccccaaaccactgaatggcgtcctgtaactaaaccacgccctagcaccaccgcttccagcgacacccagaccccacttgtcatagaccaggaacgagggtataccaccacctccgacgtgacaccaacgattaggctgcccgccgaaaatggtaataacaccggtgctggaccctcctccgcattaaccctcgccgacctgaatgataaccaagcgccgaccactaacaaaggaaaagagaaacttgaggaaatggtcgaaactggcccaactatcatggaacgcttcctcaacaccgttcaggaaccaacacaagatttatgggactccgcctctgaatccgccgcgagctacctcgctgaaggcctcggcatctctgccatccaagcactcccttgggcacctcacttggaactcatcaatgcattaggcttccagggcactgaaaggcaatacggcccagacaactgtctcatatggcctatcacgcattacagagaattgcccagaagcaacaatgtcgaagcccctccggaagtgcttgagctgctcgactgcatcaatagataccccactgacgtcccaatgctcaaaactcgagccgccgccttcggttcagacgtcaagaatctacgcataggggcacttgttaagaaccaggacaaacagtggcgcgcatcactcgcactactttgtgaggaaaatgaacacctcctccctaccactgtaatacacggcgctggtggctccgggaaatcccacttactccaacagtgggtggcgtctactgagcgcggaaatgtagtcaccatcttgcccactatcgaactccttcgagactggcaaaacaaatgtccacatgcaccgaaagagactttcaaaaccttcgagaaagcgctcatccagaacagcgcccccgtggttatcatggacgactactctaaacttcccccagggtatattgaagcctacgtcagcctcaagggccagtgcaaacttctcatactcactggagatcctagacagagccactaccatgaggagaaccctgaggccttaatctctactcttgaccccgccacggactactttggcaaattttgcgcatacaacatcaacgccactcatagaaatgccaaaaccttcgccaatgcgcttggggtgtactctgaaaaagaaatccccaccaccatcacctgctcatcctaccagaaaagcggttggccaacacttgtcccatccatccttaaaagaactgcgctcaacgacatggggcagcgctcactaacctacgcaggctgtcagggactcaccaccccaaaagtgcagatagttcttgacaacgccacaccactatgctctgacaaggtcatgtacaccgcactatctagagcggtggaccaaattcacttcttcaacactggcccaaatcacactgattactgggaaaagatgaacgccacacctttcctcaaaactttcatcgaccacacacgtgaggagaccttcgctgagcaccaacctgccgaacccacagtgcgtgagtacgcaccagcaacgcatttcccaccggctaacgagaacctagcactagagccgtgggtcgaaccgctgactgataaacactcgcgggaactcttccactctgccttaggccacagcaactgcgtccagactgaaaacaccgtagtccaactttttccccaccaacaggccaaagacgaaacgctcttctggaaaacaatagatgccagaatcaagataaccaccccagaagagaacatcagggcttgcagcatagccactgacattggcgacatcttgttcctaaattacaaagaagccatgggtttaccacaagaccccatacccttcgaacaggcactctgggactcttgtcaagccgaggtgcaactaacctacctcagcaagcctctggctgcactcgcaaatgccgcccaaagacaagaccccgactttgactccaacaaaatccaactcttcctgaaatcacaatgggtcaagaaagtcgagaagatgggctgccttaggatcaaacccggccaaactattgcttccttcatgcaacagactgtcatgctatacggaactatggctcggtacatgcgccgcatccgcacctcactttgcccacccgaaattatgatcaactgcgagaccaacccaaaccaaatcggaacatgggtgcgtgagtattggaacttcaacacccagagccatgagaatgactttgaagcgttcgaccaatcccaagacgccaacatgttacaattcgagctcattaaggccaaataccactcaatccccgaggagatcatcgccgggtatcgacacctgaaatgcaacgcccacatcttccttgggactatatcgatcatgaggttgtctggtgaagggccgacctttgacgccaacacagagtgctccattgcatacaaccacacaaggtactttgtgccgaaaggcaccgcccagctctacgccggagacgactctgcatgcgcgtcgcccctctctgaaaaacccagcttccaacatatctcaccagagctcagcctcaagtctaaggccaagattagaacccaacagaaaggagactttgcgaccttctgtggctggctcatcactccaaaaggcctgatcaaaaaccccacccagctttacgcctcctggttattggctaagcacaacaaagatctcgcggacgtggccagaaactatgccttggacttacgcattgcctatcaacttaaagacgagctctatgagttattatcacctgaagaacttgaccaccaccaactgctcgtccgagagatgatcaagcacaaaatgggccatctcctcaacctccctgaggggtttaaaacaaactaa

SEQ ID NO: 536 - DNA, 5343 bp, Potato latent virus
  source 1..5343: mol_type = other DNA
atggctttgacttacagaagtccattggaagatattgttggtgcatttgaaccaagtgttcaaacagctattgcgaacacagctgctaaccactacaagcagcttgaggaagagaagggaatcttatttaattatgcattgccacctgaggccaaacagaggttaataggcgctggcatatatttaagtcccttttccgctgttccacattcgcatcctgtgtgtaaaattttagaaaatcatctgttgtatgtagagcttcctagtagactagataattcttttatgtttgtaggtattaaaaactttaagttggatctgctcaagcgcagacatgcaaatctaagcatgatccaaactatcaatagatatgtttgtagtttagataaaataaggtacggttcaaatttcgtagttagatctagcgctagttatccagagctttgcagacgcaaaggtgagcttgacggagcagtgttgagggaattggtgcctgagttgatgattaaaagcgctaagaatctattcttgcacgatgagcttcattattggacccatcgggatctgattaccttcttggaggtactgaagccagacaaactgttgggcaccttagtttacccacctgaattgctaaagggtgcgaagaaaagtttgaactcttggtgctacacatatagagtggacaaagacaaattgtttttttatccagatggcgtccattctgaaggctacgagcaaccattgagtggcggttacctcctcgaaacaagtaggattaccacacgtgatggtgaagtttattgcgtcgatgttgtgtgcagtaaattcgcgcatcatttgattgcaataacccgtggtgatctgattgtacccacacaacgcagttttgctccctttgaggccataactagtaaaggtttgaataacttggtgaggggcaaggtggaatgtttccccgtatgcgcaagtgtagtgtctaaattgtataggtatttgcgcacactcaaaaaacccgatgagcaatcagcaatggccaaattgagccaacttcaggcaaatcccactggggaagagatacatttcatccagggctttgccaaattggtgataaatacaaacaaaatcgacagtttaatcaactgcgatagtattaaggtgttcatgggcaaattgtttggtccgttgcccaattggcttaccaagagattgaggagcgtgcaagaggtgtctctcgatgaatttgtccattactttgaaccatatgtcgtcaacgtgcccactaagcatgtgaactatggttttgagttcaattacgtaatggaagatttcaggtacgagcagggtgagaatgatctagtggatatgctagacaattttgatggctccacaaagatgagcacaagcctttgcatgatgaccccatacgtcggcttagcaccattgaccacgcgacgcaaattcctatgccatatcgaggagaattccatattcagagtggtgtctaggaacatcttttgtagctacacaaatagttacaaagtggccgtgagcactgagggggtggttcggatacttgagatttatagcaaagtgtctgtggatctactgggagcgtatttgggaaaattgctcaagaaaacagagttcatagagagagtgcgatcaagggttaaggcaattgccataaagcacctcaagtacacttggcaacaggttggtctagcttggttcaccagtggaaggcgtggctacacaaaatacattgattgcagcccatacacgatgaataccttcaaagagcttaaagagagatggggtgtgattgtgcgtgaattgtctaaacagcaggacaacgctgaagctgcgaaaaacatacctgagcaggaaattcaaacgaccagcaaaccaagttgtgtggagaagcgaaattacttctcgaacactttgatgactagctttgctgcgtcaggagtgaaaggcaaggaacaggtgagctccgaaattgccaagggtaggggtgaaaggagcgaattgagggcaactaaattgatgggctcatgcagcaccctcggcaaagtggctcacatagcatcaagaaaaggctccatgggggtattggaatgtgtagcgagggtcatcaaattggatttccaaaccgccttgaagttccttagagtcaagggtgtgtggatgcaggagtatgagagcataggcgagttggaggaggagcagatacagagtcctgcatatgatttttgtgctgcgatcgcaatgaccttcaatgttgaaattgaattgacgttcccaggctcagagcttgtttaccacttcgctgcaagttcaactgtgagttgtatccgcttgagcatttgggaaggcgtagtcacactgatgagggctgaaaatgattgcgttatcactgcatgtgcacaagctttagctagggagcctgaggatgtagtgaaggtgctcaaagatagattggaggagagcatactggaagagatttggaacggcgaaggggtgcctttcgagagaatgtatctcttctttgaagctctggatattcaagcacattgcaatcgcgatggtgcacagctagtgttgaatggcgggggcaagctggcgcgatgtttcgtgattaaagaagatcacatcgagttcgcaggtgagaaaaaggtcagtagagtacttgagctccaggatgctagaacaagtagtaaagcagacccagaattggtcaaggagtttcagaaagccgggactgtggtagaatatgtagcagtgcaatccagagcgcaagtcctggcgaagagtctagtggatgcaaccactggggtgtgcagctcaaccatattcaatgactgtgagagcttggaacgttcctttagattcaccgaaagcgaactagcgcgaaatgtttgttgtgttatcggtacgtttggggctgggaagagtaccctgttcaaggatatgatgaggcagtgcctagggaaaggtgttcactacgcatcacctaggaaggtgttggcgaatgagctcaaagctagtttgggtttggcaaaagggaagcggaatcgaaaagtagggacagagaattggaatgtgcacaccttcgaaagtttcctaaagaaggcgaaaaatgttgcagagggtgagttggtgatcattgatgagatccagttgtacccgcctggctacctggatcttctactttacctcatacctgagttcactagcgtcttcgcggtcggtgatccatgccaaagtgattatgacaacgagaaggataggcatgtcttcttaggggttgagacagatgtctgtaggcttctgagcggccgtgagtacgaatttaatgtactttcccgcagattccacaacttaggctttgaaagcagattgccctgcagattcaaattcccggctggagcagtcaaggaagagtatttgttcgttaattcaatgactgaggctaatgagttggacagcgcctacaaaagtgtgtaccttgtgtcatcccacttggagaagaaaatagtggagtaccagagtgacgttaaaacgccgaatgtgctgacgtttggtgagtcgactggttgcaccttcaagtatggttgcattctcatcacgcaagtgagtagcgcatgtagtgagcgcaggtggatcactgctctatcgagattttctcacaatctctgtttcatcaatgcaactggtgtgcccatagaaaatgtggcgaagagttacaaagacagaagtttgggaaaattcctgtgtggaactgctgttgagggtgatataaaatcaatggcttatgggaccccaatcttcaaagagcagttcatcgccggcgttgggcgcgatgaaggtgtcaaggaggataaagtcaccggtgatccttggttgaaaaccatgttggatttgatgcagctcccagatgttgaggaagcagagatgatgcaggaagagatgcaagaagagtggttcaaaacccatttgccacaagaggaaatagaaggggtcagatgccgctggattcacaaaatgctagctaaagaagcgagggaatgtagaatgggatcgatcgtttcagaccaattcccagatgatcatagcaagcaagaggggaagcaaatcactaatgcagctgagcgttttgaagctatatacccaagacatcgggcaaacgacacagtcacattcattatggctgtgaagaaaaggctgagattttccaggccttctgttgagaaagcgaagctcacgcaggctgaatgttatggaacttacctgctcaaaaacttcttggatgtgatcaagctcaagcccgcacatgatgaggcaatgatgatcagagcgaaggaagattttgagcagaagaaggtgagtaagagtgctgcaaccatagagaatcacagtgggaggtcatgcagagattggtgcatagatatagggcagatcttttcgaaaagtcagatatgcaccaaatgggacaacagaatgcgggtagctaaagcagcacaaacgattgtttgctttcaacatgccgtcttgtgccgctttgctccctacatgaggtacattgaaatgaagctgaaagaagtgctgccggctcggttttacattcatagtggcaaaggtttagatgagctcaactcttgggttaaagaaggtaggtttgagggagtgtgcactgagtccgattatgaggcttttgacgcttcgcaggaccagtacatcgtcgcttttgagttggcactgatgaggtaccttaggcttccaaatgacctgattgaggattacaagtacataaagactcacttgggttccaagctggggaattttgcaatcatgcgcttctctggtgaggccagcacttttctattcaacacaatggcaaacatgctcttcaccttcatgcggtatgagcttcatggcgatgagtacatttgctttgctggtgatgacatgtgttcatcaaagagattgcgaatcaagaaaacacatgaaagctttcttggaaagctgaagttgaaggctaaggtgcaacacactgagaagcccacattttgtggctggaatttatgtgctgatggaatatacaagaagccacagctggtctttgagagaatgtgcattgccaaagagctcaacaacctgcacaactgcatcgataattacgcaatcgaagtggctttcgcttacaaacttggggagctggctgttaacaggatggatgaagaggaattgggggccttttacaattgcgttaggctcataacaaaattcaggcatctgctcaaatccaatgtagtggaggtctttaagcgtaaatag

SEQ ID NO: 537 - DNA, 6318 bp, Apple stem grooving virus
  source 1..6318: mol_type = other DNA
atggctttcacttacagaaaccccctcgaaattgcaatcaacaaacttcctagtaagcagtctgatcaactgctttccttgaccaccgacgagattgaaaagaccttagaagtgaccaaccgcttcttctctttttcaatcacaccagaagatcaagaattgttgactaagcatggtctaacacttgcacctatagggtttaagtcacactcccatccaatatccaaaatgatagaaaatcatctcctgtatatatgtgttccgagtcttttatcctcctttaagtcagttgcctttttttcacttagggaaaataaagtagacagttttcttaagatgcattcagtcttttcccatggaaaaattaaatctttggggatgtacaatgctataattgatgggaaagataaatataggtatggtgatgtagagttttcatcttttagggatagagtgattggtcttagagatcaatgccttacacgtaacaaatttccaaaagttctgtttcttcacgacgagttgcactttctaagtccatttgacatggctttcctatttgagacaatcccagaaattgatagagttgttgcaaccacagtttttccaatagaacttttattcggggacaaggtctctaaggaacccagggtttatacctacaaggtccatggctcttcattttcattttatccggatggtgttgcctctgagtgttacgaacagaatttggcaaattctaaatggcccttcacctgcagcggcatacaatgggctaacaggaaaattagggtaaccaagctacagagtctcttcgcccatcatgttttctcatttgacagggggagggcttgtaatgaatttaatcatttcgacaaacctagctgtctacttgcggaagaaatgcgccttttgaccaaaaggtttgataaagcagttattaacagaagcacagtctcttccctcagtacatacatggcttgtcttaaaactgcaaatgcggcttcagctgttgccaagctgaggcagttggagaagagggatctttacccagatgagttgaacttcgtctattcctttggagagcatttcaaaaattttgggatgagagatgactttgatgtgtcagttctacaatgggtcaaagacaaattttgccaggtcatgcctcacttcatcgccgccagtttctttgaaccaacagaatttcatttaaacatgcgcaaattgttgaatgatctggctactaaaggaatagaggttcccctttctgtgatcatcctggacaaagtcaacttcatagagaccagatttcatgccaggatgttcgacatagcacaggcaatcggggtgaacctagatttactggggaaaagatttgattatgaggctgagagtgaagagtacttttcagagaacggttacatctttatgccctctaaatcaaatccagagagaaattggattctaaattccggttcgctgaaaattgactattcaagattggtaagagccaggagatttagattgagaagagatttcctagatcccatatctaaaggaaaatcccctagaaaacaactcttcttggagtcaacgggaaacattaaatcaaatcccaatgctgaaaaaaatagcgagagcggcgaaataaagattgaaggcagtgccgaaaatgatcagccacatgaggtatcacatacttcaatggaaaccgaggatggacagggttttgaaggttcaataccagttgatttaatcaattgctttgaaccagaagaaatcaagcttccaaagagaagaaggaaaaatgattgcgtcttcaaggccatctctgcacacttggggattgactctcaagatttgttgaattttttggtaaatgaagacatatcagatgaattacttgattgcattgaagaggacaaaggactgtcacatgaaatgattgaagaagttttgatcacaaagggtctttcaatggtttatacttctgacttcaaagaaatggcagttcttaatagaaagtatggagtgaatggcaagatgtactgcacaattaaaggcaatcactgcgagctgagttccaaagagtgcttcatcagattattgaaagaaggtggtgaagcgcagatgtcaaatgaaaatctaaatgctgattccttgttcgaccttggaagatttgtgcataatagagacagggctgtcaagctagcaaaatcaatggcaagaggcacaacaggcctcctgaatgaattcgacctagaattctgcaagaacatggtgaccctttcggagttgtttcctgaaaacttttcttctgttgtcgggctaaggcttgggtttgcgggttctggtaaaacgcataaggtgcttcaatggattaattacactccaagtgtcaaaagaatgtttataagtccaaggagaatgctggcggatgaagttgaacctcaactcaagggaacggcctgtcaggtgcatacatgggagactgcacttaaaaaaatcgacggaacttttatggaagtttttgttgatgaaataggtttgtacccacctggataccttacactgctacagatgtgtgctttcagaaagattgttaagggacaaagtgaaaatttcttgaaaggcaaactgttggaattgtcaaagacttgcttaaacataagatgttttggtgatccattgcaattaaggtattactcagctgaagacaccaatctattggacaaaacacatgatattgacctcatgatcaagacgatcaagcacaaatatcttttccaagggtacaggttcggtcagtggtttcaagaactggtgaacatgcccactagagtggatgagtcgaaattctcaaggaagttctttgcagacatttcaagtgtaaaaactgaagattacggactcatcctagttgccaagagagaagataaaggtgtcttcgctggaagagttcctgtagcaacagtgagtgaatctcagggaatgaccattagcaaaagggtgttgatatgtttggaccaaaatctttttgccgggggagccaatgcagccattgttgcaataacaagatcaaaggtcggctttgactttatccttaaagggaattcattgaaagaggtacagaggatggcacaaaagacaatttggcagttcatcattgaagggaagtctattccgatggagaggatagtgaacatgaatcctggagccagcttttatgagagtcctttggatgttggaaattcatcaattcaagacaaagcttctaatgacctgttcataatgccttttataaatttggctgaggaagaagttgacccagaggaagttgttggggacgtaattcaacctgttgagtggttcaaatgtcatgtgcctgtcttcgacacagatccgacgcttgcggagatttttgataaggttgcagcaaaagaaaaaagggaattccagtctgtgctgggtctttcaaatcaatttcttgacatggaaaagaatggatgcaaaatagacatcttgccctttgcgcgacaaaatgtttttccacatcatcaagcgtctgatgatgttactttctgggcaggtgttcaaaaaagaattagaaagtcgaactggagaagggagaaatcgaagtttgaggaatttgaaagccaagggaaagaacttcttcaagaattcatctcaatgctaccgtttgaattcaaagtgaatatcaaggagattgaagatggagagaagagctttttagaaaaaagaaagctaaaatctgagaaaatgtgggcaaatcattcggagagatcagacattgactggaaacttgaccacgcctttctcttcatgaaatcacaatattgcacgaaggaagggaagatgttcaccgaagctaaagctggccaaactttggcctgtttccaacatatagtcctatttagatttggacccatgttgagagcaattgaaagtgcctttttgagaagctgtggagactcatactacatacactccgggaaaaacttcttctgcctggatagctttgtgacaaagaatgcaagtgtctttgatggattttcaattgagtcagactacacggcctttgactcatctcaggaccacgtcatattggcctttgaaatggcactgttacaatacctgggcgtgtcaaaggagtttcagctagattaccttagactgaaattaactctcggatgccgtctcggatcactagcaataatgaggttcacaggagaattttgcactttcttattcaacacatttgccaatatgctgtttactcaattgaagtacaagatagacccaaggaggcataggattttatttgctggggacgatatgtgttccttgagctctctcaaaagaaggagaggggagagagcgacaagattgatgaagagcttttccctaactgcagtagaagaggtgagaaaattcccaatgttttgtggatggtacttaagtccatatggtatcattaaatctccaaaattgctgtgggccaggatcaagatgatgagtgagagacagcttttgaaggaatgtgttgataattacctatttgaggcgatatttgcctacagattaggtgagaggctttacacaattttgaaagaagaggattttgaataccattatcttgtcataagattttttgttagaaattcaaaattgttaacagggttgagcaaaagcttgatatttgaaattggggagggcatcgggtccaaatggctatcgtcaacgtcaaccgcttcctcaaggaggtcgaatctacagacctcaaaattgatgctatctcgtcctcagagctttacaaggatgcaacctttttcaaaccagacgtgcttaattgcatcaaaaggtttgaatcaaacgtcaaggtttcctctcgatctggtgacggcctcgtcctgtctgatttcaaactgcttgatgacaccgaaattgattcaatcaggaagaaaagcaacaagtacaaatacttacactatggagtcatcctggttgggatcaaagcaatgttgccaaactttagaggcatggaagggagagtcattgtatatgatggagcctgcctggatccgaaaagaggccacatttgctcgtatcttttcaagtttgagtctgactgttgctactttggtctcaggccagagcactgtttgtctaccacagacgcaaatttggccaaaaggtttagatttcgtgtggactttgattgtccacaatatgaacaggacactgagttgtttgctcttgacattggagttgcatacagatgcgtcaactctgcaaggtttttggaaaccaaaactggcgattcaggatgggcttcacaggcaatcagcggctgtgaagcacttaaattcaatgaggaaatcaagatggccatcctggatcgcagatccccgctgtttctggaagaaggtgcaccaaacgtgcacattgaaaagagattgttcagaggtgacaaggttagaaggtcacgctcaatttccgctaaaagggggccaaactcaagggtgcaagaaaagagaggatttaggtccctctcggctagaattgaaagatttggaaaaaatgagtttggaagacgtgcttcagcaagcgaggcgccaccgggtaggagtatatctatggaagactcacatagacccggcaaaggaacttctgacggttcctccccctgaaggatttaaggaaggtgaaagctttgagggcaaagagctttaccttcttctttgcaaccattactgtaaatacttgttcggtaatattgctgtctttgggtcatctgataagacccagtttcccgctgttggatttgatacacctccggttcattataatttgacaacgaccccaaaggaaggggagactgacgaaggaaggaaggccagagcgggttcgtctggcgaaaaaacaaaaatttggaggatcgatttgtcaaatgttgttcctgaattgaaaacctttgctgccacttccaggcagaactctttgaacgaatgtacgttcagaaagctttgcgagccatttgccgatttggctcgagaatttctacatgaaaggtggtctaagggattggccaccaatatttacaagaaatggcccaaagctttcgaaaaaagtccatgggtggcctttgattttgccactggtctgaaaatgaatcgtctaacacctgatgagaaacaggtgattgatagaatgaccaaaagactttttcgtactgaaggacaaaaaggggttttcgaggcaggttcggaaagtaacctggaactggagggttag

SEQ ID NO: 538 - DNA, 5889 bp, Citrus leaf blotch virus
  source 1..5889: mol_type = other DNA
atggctttgatgagcaacaaaactgcaattgaatctattttgggtaactttgaaaagaaacacgtcgatgcaatctacaatgccgccgcacaaactatcctctctcactctgaatttaggaataagcattttgcttattcactcaattcttatcaaaagaagatagcctcaaaggtgggtattgaattgtatccaaatggttatttaccacattcccatccattgtcaaaaatttttgagaaccatttgctttttgatgtacttcctggcgtagtaaatactagtagattagttatgtgtagcataaaggagtccaaagttctggtttttaaagggattcgcgacaaatccagaagacaggtttcagacctcaatgccctcaattccttaaataatagtcatacatcattcattaataggttagttgcatccaaagatgtgagtagatatacggaagaagctgatgctttttttcaatccaagaaagggagtccggagctattttcaaggaatttcatcaaaagcttggaaaataaagaggctgttttttttcatgatgaagttcatcactggactaaggcccaaatgttctcatttcttaaaagcacgaaggtcaaaaggttcattttcactgtagtctatccaccagaaattctcaaaaaatttgccaattcccagaacccaaaggtttatgatttcaaagttgataagggtcggctttttttttttccggatggggttaagacagaggcctatgagcagaaattgaatatggagtggctcttttcagcatcacatcttcgcagtggagactgtgtatggactgtaacaagacataagagtatttatgctcatcacctgtttgagatatccattggcgaactagtcacggactcaaaactttttttttccgattataactccattgacatgtctaaaatatttcttgatcgttttcggagttatgaggtattccccatttcgattgagcacctttataaggtctactcttatctgctttgcctcaaaaaacctgacttggagagtggtctagctaaattaaggcaaattattggagatgatgtcgaaatcaaagaattcctcttctttgaacaattttgtaagcgcttaattgaacgccaaacctcttgggggctatttgggcactctttctttgaaaaattaaccgatatggcattgtcatccttgcccaactctatagcccgaatttttcctcaatggaaaaaaaaaaacacatttgagttccttttctcacttgggactcttgttgtggatgtggagagaaaggtgtgttttgaacatgtgcttgaggaatggggatttgaagttgttatcactgatgaaaatgcctatcttgatccactatctatctttgctatcaatgaaaattttaatgaggatagagtggacgatggttatttggaaagaatccgtcttcccttctggaatctgaatgactatgacttgaaaagaaagagggtaaatgcgtataacattctctcttatcgatttgaagaggagcgaaaaattgaatcagcgcaaaaaggtccaaataagatgctccagattgagtggtacgggattaaagaatttaaagttgacccttttatcagcaactccataactgaatttactcttttagaagcattgctgggaaagaggatagatccaaaaaaatactcatattcaaagcaagcctgcactctttccaactatctcacatttttgtgtgctgagggtttggatggattcaatttggaagagcaccttgaacgaaggttgaaagcggccggtcatgacgtttcagatgacgaggaggaagaattgacttcagctgaacaagcggggcctatcaagatattggctgatccacttggttttatgaaagagtgtttggaggagatcccaatcgaaactgaaccatcactggaagaaagagggcagttttccactgattatcattctgagaaatttgaaatcaattacaatgacatttttaatcctcacaattgcatgaacactcacggcgatgaaattcccacaccgtcagatggcaattgttttttttcagcatttactgaaacttttgaagttgaaagacctgacaccttgaggtctgatttctcagactggcttatggaatttaatggggggtcctatgcttcacttgcagaaatgatcagaccgaatggagtttttatggaggcagaactcatatacttgttttgtgtatttagaggagtcacgttgattattcatgatagaactcatgaaaaagagaatgtttatgctgtacaccgcgggtttgaggagggccatatggtacatagaggcaatcattttgtcgggattgaaacttacaatattagtactttaacctcagaccccttacttggtgacatcccatgcggtttttcagaggaaattacaaaattccattttcggcctgatcatttcaactgtgcccagttcagaggaaggaaggcggcttttatcaccaaagttgatgcagattacgggcacaacggtatggtttacccccacaattcatgggtaccttctttagaagagatcattcagatctgtggtcagggagatgatttcaattgtgcattaataaatttctatgaggcaaactcatctcttgggttccatagggataatgaacgggtgtacaatgatgatcctattttgaccgtctgcacattcggtgaaggtagattcaccattgaatttaaggatcaggtaacttcttttctaatgactgctggctctttctttttaatgcctaaagggttccagaagaaggcaagacactctgtctcaaatgaaatgtcgagagtctcgattactttcaggaagcatgttagaaggttgaatgggtcaccgattgccatcagggaagaaaattacaaaaatacatgcctcattaatgccttttcaaaagcaatgaaaaggagcaaacaggcaatcattgcaaaactgaagactgttaatagccctttctggagtagatacctatctgagggtaacggtggctccattgaagattgtcaatcggcctgtgaggcactggatgttactgtcgaccttaatgtaaatggaaaatgtgtggttcttggaaaaggggctttaagaatctcaatggctttaagaaacaaccatttttcagttatcaatgctgcacaactgatggagaggacttttgttagccacttgcttgaaaaaggaaatgtcaatgtgttagaaggatttgacgcaatgctaagtggtgatgtgggcgcagcaggtgttaacaaaattcaatttgcagccaattttgaatttgctagaattttggcaaattcatttctaaatatgacaactggcatctgcctgggcaaggcattggataatggggaaaagtattttctccacattttgaaagatagagtgaaacagattggtatagacgtcacaatggtgtgcggatttgctggatcggggaaaagtcgcaaactgcagtcctggctgcattcaaggaaaaaagggaacttctgtgtggtttccccaagaacaaacttagccgctgactgggcattcaagttagaattagagcccaatgaacagagaaaggtttcaacatttgaaaaattcatcaaaactgataaaagcaaattagatctcatagttattgatgaattgacattgtttccaaatggttacctggatctcctcgtgtatgaattggctgatgtcaataggcattgtcaaatcatccttctgtttgatccattgcaagcaagataccacaacaaaatggatgaatcaatcctgacatttgaacatgacgtggacaggcttattggtggacagaacattgagtacatttacagcacgcatcggatgtccagatacttcaatagattttttgatgtaccttgcttcaatcaggctgatagaacagaggaacaaaggttgtggatatttgatgacgtttactccataccatccatttgctccgaccgtcaggaaccatgtgatgttcttttggttgaatctgaccttgaaaagaaggcattttcacccatcataaatgttatgacatttggtgaatcccagggactcacatttaatcatgtttgtattttgctgtcagagtccagtgcagcttcaaacgaatttagatggatggtggcgctgacgagagcaaggaccaggttttcactctgttcaaccttcttaggtggaattgaagaatttaaagtcaaaaggaaggaaagtctcatcacatccatactccaaggcgagaagatcacattcaacagattaaatctgatgctgaaatgcaatttaattaggagagaaaaagaaaatgggtgcagagatgaggtcgatagggaggaaaggttggagggtgaccctttcctcaaaccatttatcttcttgggacaaagagttgagaaggatgaagatgaggtagaagaagtgaagatcagggaaccaacctgtcaaactcatctgtatataacagagcctaattttggtttgtgctacaatttcgacttcattagggaaaaagaacagcgggaatacagagaggatatgcttgtaactaaccaattctgtgacagttatgataaggttcatataaacggcaaaagagaaacccctggtcccctgcgattcaaagcgatttatccaaagcactcagccgatgatgacatgacgttctggatggccgtcagaaaaaggcttgtatttagagaagaggaggagaattatcaaaggttgtcaagggcgcatttagttgggggtttgctatacaccaacttcaaaaaaaaaatgggcctggaatttacgtttgaccaaggtctactggaggaaagcataaatgcatttgaaaagaaaaagctggaaaaatcatgtggcacaattaaatctcatagcataaggtcggacattgattgggcgctgaatgatgtatttcttttcatgaaaagccagttatgcaccaagtacgaaaaacaatttgttgatgctaaagcgggtcaaactcttgcctgttttcagcacctgattttggtacagttcgctccatggtgtagatacctagaaacccagatcagaaatcagttgcctgaagaaatttacattcactcaaataaaaattttgatgatttgaatgcatgggtcaaaaaatttttccagagggatatctgtgttgagtctgattatgaagcatttgatgcaagccaggatgaatacatattatccttcgagattcatctgatgaaagatgcgcattttccgcagaaaatcattgatgcatacatagaccttaaatgcaaattgggatgcaaattgggccatttttcaataatgagatttacaggggaattttgcaccttcctattcaacacactggccaatatggcattcactatgtgtagatacgaatggaggagaggacaaccaattgcattcgcaggagatgatatgtgtgcattaaacaatttggctgtttgtcatgatttcgatgacctttttgaactcatcagcctaaaagctaaggtggaaaggacagaaaccccaatgttttgtggatggagactaactccatatgggattgtgaaggagcctgaattagtctataatcgctttcaagtggccattgaagagggaaaggtcttggagtgtctggaaaattatgcaatcgaggtttcttatgcctacagtttaagtgagaggctgtatgaagttttgaaaagtgaaaggcaagttcagtatcatcaagctgtggttagatttatagtcacgcacattgacaaactcaaaacaaaagtgagggaccttttcttagaacaatcttccgacgaagatatctga

SEQ ID NO: 539 - DNA, 6588 bp, Soybean latent spherical virus
  source 1..6588: mol_type = other DNA
atgtctttccattgtccaagttctacttgccttggttacactcaatctttctctcgccgtgatatgcgagagcaaggggatcgttgtccccatgctatgtgtggtgctcttctagtgaagaaggtgcccactttatccccacagggtgccagacctgtggtatcaaagaccactgttgtggtccctcctcaagccactgaggaggttttgtattatgggtgtgcccccagacccgcttttcttgaagcggttttggcggccccaaaattaaagatggctccaccagtggtggatgcgatggaagtcgcatacctccgtggtgttgcagccatggaagctgaggagaagaaactcctcaggaaagaaaaggctgcagttgtggcccgtgctaaggcacggcgagctgcaaggaaggcagccaagaagcaagttgccgagatgaaggcaactgtggccctgaaattggccacaaggcaaaaaactgcacgtttgagtgcagctaagagggccatgaaggccaaaagaaaggcagccaaggaggctgccaggttggcgcttgaagagcgccgtgctgcgggtttaacccgcaaatcggccttcaggcgtagcctgaaaaagaaagccactaagatggctggtaggaaggtccctaagacctccacttccacctttcccaaggtggaatctttttcttgttttccttcttctcccctccctgcttttattagggaggaacagccctgggtggctgtgaataccccctgccctcatcctgagggcttcgatttggcggttgatcccgcctttgtggctcctattgtggggccaatcgttagtgtgccatttatggcacctgttgtgaaggcttttaatagccttgtagaaattttggcggctatcaattatgaggccgctgtagatttaagagcctacattttagaaatagcttcttacgaaaatttctttgctttacggagaatttttgttggaaaagctttatcttggatggctcttatcctacctctttatccctatgcgggcatctttgatacttatctcccacttgatatggtggaagataagaattgtgatgcttatttagcctcattacagcagactgcagtgatggtgctggaagtgacccagggaccaatggacgcacattctatctttgatatagtgcgttccgttggttctaaggttgctagcataaaggacaaggtagtgggatgtatagttgagaaatctgctgccctgttggacactgttatagacacagcaaagggcatgttttttggagttcttggcccataccttgcccgcgcacagaagatcggagaggaaattaaaaaattctgggataactgtgtcgagtgggcaacaaaattgtggcaaggagctcatatagcattacaagctcttggcatttatgctgtttgggctatagttgctatggtgcttgtaggagtaatgtatatattagaaacaattttgatttgtttaggtgtaatgagtggtcatggtgtccttgttgttgctttgacaggggcagtcatgacttttttaggttttactgtttttcagatggggcgtgagtatatacattttttgaccgccctacgtcaaatcattttcttagcagttattccccaaggaggattgactcaagttaatatcatggattcgtccgttgatgttactgagccacactccttgttagatactgctatggcaccagttcattttttggaaactgttgccagtggtttaacattcttttcttctacctctgttacagtcttaggtaaattaggaaattctctggagggaattcgcaaaggttttaattgcctacgcgattttacttccgttttgttagaacaatttggaaatgcttttgaatacatttccggtaagagaacgtctttcttccgtgatcttgcgtgtgcagttaaagtagatatcgctcgatggacccaggatgcacgggaaaccattgagtattttgaaatttcaggttcccttgataggtatgagtattatcgtgctcgtgagcttatctatcaaggtcaagatttgatcgacaccgccaacaaagctcgtagttcgcacacaagtgtaaaattcttgcgaactattggcaagttggttgaggaactaaaagaaattcgtgctaagtgtgcacgaagtttaaaattcccaggatggcgtcgacagcctttttgggtatattgttttggtgagagtcaatgtggcaaatctactttggcaaattatttgatgccattgttgatgtctcacatgggttgggatcctcaggatgtttacagcaaggatcccgttgatggttactggtccggatattatcagcagaagggtttaaagataaatgatttatctgctgttaattccaaagatgtagcgcccctcgagcagcagttgataccattgatatccactgaggagaaaatggtgtcttcggctgaaattgaaggaaaaggaatgcagtttgcctctgaaattgtagtttcttcatccaattttaatgatgcaccaactggtgctgaaattttggatgcagatgcttacagacagagacgaaaggttttgatgcgctgcagaagggctgctgagtgggttcataatgctgatggtacgcgcacagagaagcttgatgctgagggcaaaattgtatataagccctatgatccatccaatgctttatcttgtaccgaggtgcaatggattcatcctgtttcatttacagctcttcccggaccctgtgggcagtggcacttagccgagttcaccatacctatggtgaaggaggctatggatgcccactttttgcaagaagaaacaaagatggcatcctggaagtcgagccttggcatgaagagtcaaacagcaaggaaaatgggttcatacttgcaggatatgattaagggtattggtaattttgttacccttaaaggagcaaaagattcagatcctcgttatttgctggtagctgttgatggaaaatgctatgcgttagaccagcaagggaaagccactccttatgaggattgtgatgttgttgaagaaattgagcggctaactttgttgcaataccgctcttatttcgcggacttggtaatggaacatgctgacaatacatattatcaagattcattccattcatcaacagtccgagattttttgttggctctaatgaaagatgggtcaactgttttgtctgtggatagtctgggtagtagtactcaggacattcacaaagaattatgggcagaattgggactttcagaaaagatttttctgagggtttcacaaatagctcgtaatcaattgcgcgatgctccacattttaaggaagacgttgcgcacaattttttggaaactatgaggcatcttagggatgctattgtagatagaaaggaacaaattcttttattttttgcagcagtagctttagtgggcttgtttagttggggttttttgagcctaattaaacaatttgcttgtggttctttaggatttggtgctggcatcgcattgcgtgagcaaattgctcatagtagtgttatgtcttcaggtagtgtgactagtgcctttgttgcacgcaacatgccagttgtatggggcaaagctgctaggtatgccactgcacactcaagcaaagaagaagtgggcgccaattttgattattttgaagatgctagtgctcatttgttagctcgtgttgttggctcatctggtcagtctgagacctgccttttatttggtcatcaggctattgcactttgtgcgcaccagttgagattgtttcctgacaatgacagggtgactatccattatttttcaaaggagaggcgccctgtttgtttttcatttacttggcattatattaatgctattgagtggcctgactgtgaagtaattgtatatagagatgcacagctcacgccactccctgtatatagtgatgataattatttgtgtggggagcaaacattgcccacagttttaacgataactgggctctcaattaagaagaagaaattctttgatgattccacgttgtgcccaagcgaaaaaattctggacggtgaaatgcccatcgtccggagctggaaagataccgcttctctgagaacgcaagtccagacaattttgtccgagactcatagaagagatataaataggtattatacttctagttacccatcagggaaacatgatagtggaggtataataactgcagttataaatgggaagcgtaaagtgataggcatgcactgtgcgggggcgcaaaatgggaaaatttatgttagtaccattggtcttttgcccacccgcaacattaatgatgcacactctgctgccgattattttgttccaagtattggcagggaggaaaaaggattttgcaagattggttggattgcagatccttcaaagagaccacatgctgccactaagactgcattggcaccagttcctaaggaattggctttgccattgccagagggagtgtctgtaaagattccttctattttaagtgcagcagatccacgcctgcgtgatgaggtgaatcctgaatttaaggattatgatcctctacgcgtaggtatggataaatttgccaaccccatggatccgcttgatgatgaagttttacagcgggtctgtgaagatatttatgaaacctggtatgactgtttaccaatactagatgatgagaaggtcttcttgcaaaagacctccttggaggtggcgttgaacggtataccgggtgaggcttgctatgaagccatgaggttggatacatctgagggttatccttttgttttagaaaggaaaccaggggagagcggcaaactcagttatgtacatattgatgagaatggcgttcgttcccttattcctggtacatcggtttttagagattaccatgaattgtcagcaagtatactgacccaagtgcctgtgttgaattgcattgaatgtcctaaagatgagttgctaaaaccatctaaagttttggagaaaccaggcacacggcttttcgatgtactcccctttacacataatattcttttgagggagtattttttaaatttttgtgtttttctccaacaaaatagggtgcatttgccctgttctgttggtgttaatccatattctcgcgagtggacctggctttttgataggttggctgcgaagagtgataaagctttgaattgtgattatagtaaatttgatgggcttatatcacatcaagtctacatgcacatggttgcaaccattaaccgactctttagagatggtgaggaagcaaattgtgcgcgtaagaacttgtttttaatgtttacatcacgcaggagcatctgctatgatcaggtttatatggtcaaaggtggaatgccttctggatgcgcactcactgtaattattaattcaattttgaatgaaattttagtgcgctatgtctatagaataaccgtcccaatgccagccaaaaactattttaataaatacgttgaattggtggtatatggtgatgataatttaattgccatacatgatgatgtggtctctttttttgatgggcccattattaaggaaaaattggcagaggttggggtgaccattacggatggtactgataaatcatcacccaccttgttacgcaaaccgctggagtctcttgattttttgaagaggggctttaggaaaattgaagggggaatgtattcttgccctctggataaagggtccctttactcccggttatattacagtgctggaggtaaagggggcctttttcaacttgatatcctccacgataatgttaaatctttcttggaggaactgacgcatcatgctgatcattatgaagagtttcaaagagtgcgcagtttttatattaagcgtattccttcatggtcagctacgctgcctacctatgctacatgtctgaatatgatggaggggcagcggaattcagcaacaccctggcaaccacataaatttatagaaacgcggccttcaggttgcgaaactaaaatgatggcgggccaggataatcatgctcagaagatatgtgtaactgagcgtataattatatgtggtgaaaaatatacgccaccaatactggagacctcttttgttgtttcaatagacaaccccctttatattggtgaaaggggggagtatgttaaaacagagtttggttcaggtatggggcgactgcctactgatgcctggatcaaagctttctccagtcccaagaagcacccacagctttttgaagcttataagatgggtgctactatatattttagatcctgcatgccctatttaaatgcatggtgtgcagtgtgtaagtttgcattggctcatggaatcgatcagagttctattattgctatgtatgagtcatgcaaaccaagaggggcgggcgacattgctcctcttgtggccgtaaaggcatacactaaatttgtgaacagaccagtgtttaaatttaaagagactgttcataaggaagtgctcgaagcacacaatagtgtgcgagtcgcctaa

SEQ ID NO: 540 - DNA, 6603 bp, Currant latent virus
  source 1..6603: mol_type = other DNA
agtgattgaagtctaatattttgtttgaactctcaatttctctcaattcacctttttctacatcattctcgctaccgataaactttgaattcattatgaattcttacaactttgtttttggcagctttgatcctctaaccgggattgatgctgtctcttcttttgaggagtattactcctctcctgcgggtcctatgacccgctttcaagctcgtagaatcgagcttgcttgcttggctcgagcccgagctgctgatgctgccgctcaagctgagcgtgttcaggcggatctccgcctctgtgctgcatccatgagggagctacaagctccctggatgctttttaaggctcctgccaccaaaagcctgccagccaaatctgtggctggtcctaagagggaatctcaggaatccctctttcttagagactacggacgtagtctctgttcccctctcacgtcatgggagggctcacgcgtgctccaggatatggagcacgctgttctcgcgaaggatgctgatcctttgtctcgcgcgcttcaggcgcgcgctttaagaagggctgcctttaaggctcgttgtagaaaacgagcttttaaggcttttatggaggaatgcaagttcctctcccttcctgttcaggtggtatcttcgataccaattactgagcccctgttgcccacaccagaggcagcctctcttggcactaagtgtgccacctccaggcggcagagtaaatgccgtcgatctttttcctctttcttacctaaagaggatttttcttttgtcttaggtcctggaccagtttccgacactgaggaaactggttactcctcgggagattctgtgtcttccctggaaaagccttcggattcagtaagtgagtcctcccctcgttcctgctctcacggcatcacatgccgagctcagttttgtttcggatacttagatttccggaatgaaatcaatgcaagtcgttatttgaactggttgttgcaaacacaactaccaggaggtattacatgttttgaattacccattacatattaccttgaacattgtactgatacaatggaagctatcgacttgtggtggcacgttatggatcgccactgtgctaatttcaaaccttcaaagcatagaactccttttgaatttcatgctaagaacgctgagcgaacaataaaggcgaaaaatagtgtaccttcacgccaatcccttaaacaacaaatgttgcttgaaaaatctcaaccaaattgggaatttcttgattctttttatgaggggaaaagaggtgagggtccttggcaattcgtaaaggacaaagttcgatgtgctgttgacggcacttacagagctttcacattatttgtaaataagattttgcatagtttgaatcctttagtcatagtattaggcccttttaagcaaactttctttgaggtttttaataatcttaaagaaaattgctatgccatgctgcaaaaacactggttagcagcagctgttggtgcgtccttagtcttgggatttctctttttattagctgttatttgtatatgtaaagtatttactttcttagtctcccagttaggtttacctgtagtaactctttcatttcttgtaacaggtttgtttgttcttttctttactgtaaatggttttttagagcaagctgctgatgtacagttgtgtgcgttagtcgctgatgactttattcggtttttaagccaaaataagtcctatggagctgtcgcaggtattgttgctgatttgcaggaggatgccaaaaagggacagggcataacttggtgctttcaagcgctatataaacttatttccaggttagtgccctcaggagccaaggaaactgtagctttgttcaactccataggtagcttgagcaggagtgccaaccatggtaaggacttcttcattaatatgaaggaaatggttgtcagctggatggacgcctttcatgatgcacttgctttactaggcgatgattcagttacagctattcatacactcaagtatttgtgtgaagaagatttcctggactgggcaaagaaagtcgaaagatatgctgtggatacttatgattccatggtcatttcgccctgtgagcgactcaagattttgcgattattagtcgataagcaggaaagacttaccaaggcattcttccacccaaggattgctcggagtgcacctcgtctcatgttgaatgagtttactcgcttatcaacattgctcagggatgcacataatgcgctttctagagcctccctgtttgatcagcgacgtattccccctttttgggtgcacttgtattctgagaaaggaggcacaggaaagtccatggcgactctaccactgggtaattatcttttggatgttattgaggagccacaaagcttgcgcttcgttacacgaaacgtagcttccaagtttcttaatggctaccttcaccagccatgttttgttatggatgagtttggcgctcacccaactcaagattatagtgatgaagtcactatgcttgatttggtggggccaaaccctttgacacttaatatggcagcgcttggagataagaacattatgtttaactcaaaacttattatctctaatggtaatagaaggttaccacatcctgaggtcaaattgggagccaatcttgatggttttctccgaagaaggcacgtgctggttgaagttgttcgtgttgaagataaacctcattttaatgagtacatattactacaaccacgcacacaagataagctctacttggataaggcgtttcggccttgtgttgatcccgtgcaactaacgcctgatgagttttatgcagtttgtgctgagcaatttatgacacatctcaatagggaaggtgaagttatacaacaacacacgggtgtttaccatgtgcggtctaatgactttgattttctgcgagattacctcatgtgtaaactcaacttagggctggatgttgatgaagttgagcgcattgttacttcatatgctcatagcaccaaaggagaaaccatttttcccatagaacatgaacacatttttgaggcgtggaaagccgaattggagtccctgactttatctgagttaatttctatgttggacaaaaaagtcacggaaacatttgtatatacattaattaaaaatgatagttctaatgttttaatttctgacttaactccttatgagtgtctgatttatcagttttgtaagctcaagtataagagtgaaacagatgctcagtttccaagttttgaggcaaaggaagagaagttgccatggtacatagaatttatttctttttgtgcgaagcttgtgtcccagctaccaaaatggctgattttgtgtgttgctttgtgtgccgttttgcttgtaggttatactttaattaagtttgctctgtatatgttttcaggagctttaactcttttaggtgttttatctttttcaaacttgagtggacaaggcccagaagattcccctggttttgataatgcccgtaaaactcaaggcattcgtgtgaagtgggaagatcgtcctgcttatggcaaggcttatataccaccagatcaagacacttttgcctctcaggaggagtttaacaagtactggactagtggactcccatcaagatggtcagactacgagggtcaagggccttctgaactggaccaaagtgtcataaatctgctcaagcatcaagtcgtgttcataaatgatatgacaaaagttgtctacaatgccatagctcttgggggtagaaactttttgataacaaagcatgtgtttgatttgatgccagtcgccaactatagtctctatggttatgctatcaccaagccaaaaatttggatagataaccgggttcgacctaaaatccaactgaaagatagagacttagtcattgtggaaatgccattaactgtgccatgtttttcttcattgccaaaggatatttttctgaagaatatgcaagaagcgccaaagcaggttaatgctgtcttggtcatagcggagccaaattatgagggtaaatctgttgctaaacttgtgcaaaaatttcaaccgttcaccaatttacctcaggttcatgctaaagacacatacagttgtgggtcacttggaagccttcgtatgcccccgtgctacagctataccttcgacacttacccaggactatgcacatcccctctcatctgtatgagtggtggtcgttgcattctcttaggattgcatgttgttggaaatatgtcaaaaacaggtttttcccagattgtcactttggatgatttttctgaagtaccacttcagagtggcacacttgttggtgaaggacctgaatgttactgcataccaacagcctcatcggagtgttatggatctgttaccaaacttggtaagtggacagggccagcgccttattttcttgagaagacatctctggtaccatcaatgatatctaaggatatagatatagagatgacgacagaaccagccatattgactactaaggacccacgacttgcgcatagtaatgatcctgactttaatccttttaaagcaggtatgcttaaatatgctgttgaggcgcatggtttcaatgaagatgaggaattttttgaagatgctctagatagagtcttttctgagattcctgattttaattgtcaagagttggctgatgatgaggtgtgtaatggtattgaagatgatccttatgctgaaccgctggttatgcaaacgtcagaaggttatccattttgcacacaacgaccagctggtgcaactggcaagtcttggttattttgtggttctcctggcgactggcacatactcccaggttccttacttcacaatgaaatgaataaaatggaaaggaatttgtcccaaggaatttttgagcctgttataggtatagattttccaaaagatgagaaggttgacaagtcgaaggtgtacataaaacccaaaacacgacttttcaccattttacctgtacattacaacatacttgttaggaagtattttttgagttttgtatcacagttgatggcactccacaacgaaacacccacaaaggttggtattaatcctttaagtaatgagtggggtattttgcaatttgctttgagtgccaaaggagaaaattggtttaacggagattatagtagatttgatggaatcacacctaggagcgttctcttgggtattgtcaaacgtatctctaaccgttttgtgaataaaaattccttggccataaccgacaagacgttatctatcaatggagatcttgctagatccttattgatggacatggcttcaactcggtatggactaacacagggtgatttatggtatgttaattctggtataccatcaggttttccacttactgtaattgttaattcattggttaattctttttttatacactatgcctatatgtccatttgtaaaaagagtaatgatatggacctttaccccttgtatagttttaagcaacttgttagttatgctgtttatggggatgataatatagtttctgtgaatgatttaataaaggataagtttaacttagtaattttagctgattttcttaaagattatggtgtaacgctcaagaatggtgctgataaggatgaggaaattttgtcacccttctacccaataagtaaggtggatttcttgaaaaggaagtttaccgttctacaaggtcatgtggtcagtcctcttaataggatcaatatcacggaacgtttacattgggttagaaaaggtatgactgaagtggatgctatagttgaaaattgccaatcagcagccttcgaagctgtctttcatggtgagcattactacaaggacatctgtggcgtgatcaagaaagcatgcaccaagaatggtataacagtagatctgcctacttttcaagatgctcttaacatacacctctcaggtggtagttttgctacagctatacaaaccatgtccctccaactacctaagaggatcaatttcttacataagagctaccaatgtgtgaacgtctttccagatgtttattttgttaccaatgaaagaaatgagactgttcggaggcttcttgagcgtaccaccatacaaaatatttgttacataactcgtaattatgctagcaagaataattcccaaagtttcttcactttaagtggggaaggttggaagatgtgtagttgggaggcgcgttataaagtatacagtgccatgaaaagaccagtttattttgttgatgaggcaaatgatgggttggccatagcctacgcacttgattatagttacagaataggtgatctcgctttttctgatcttagcaagatggcggtagcactttgtggacacagacaaactatgtgttccaatatactcgataacttttccgctctttctaccatttagtttacttggctttgttttgagtcttttgtttttgtttgtcccaactatgttgtggacctaatggggtttgctagtttacccattagtctttcttctagcatcaaaaatattttagagtctgcattgtccatgc

SEQ ID NO: 541 - DNA, 5953 bp, Arabidopsis latent virus 1
  source 1..5953: mol_type = other DNA
caaaatttttaatagaacacgatcaggaccagggtccgaactgttactttgttacattcaagttatttgcaatttgtgatcaaacttatttatcgaaccttagatgtctgccagtactggagaggactaaggaagtttagatccatctgtttttgcatacattgttgagtattatcgttaagaaaggaaattttagctttgattcattaaaataatggctactattactctttttaccggtaatgcaccacatagtttaattgcgtatatcacttcaaaagatgttgttcacatgctgaaatgttatgttcaggtggacaactttccaagtgagtttcaaatttcaaatcggctgagacgcttaagggagagtcattttgacttgatatccttaggttattcggcttttgtattgcacagaaatcatttggcacaggaaccctatgaagtatattctggtgatttcatttttaatgattatcatcagtttctttgtgagacagttaccaataaaaatgcacttgaaacattgaggaagtacattcgcactgcctttttggcgtattttgatgaaattatcgaattcaatgaaagttcctatttgttggatgacgatgacatagacatgcaaggtactagagagatgttggcatcgataagcaattggatttcagccacatgttcttcagctgttgattggacggttaatgaaattatgaagagcttcaaagcacattttaatggtgttgttgagaggtattgtccaataggagtgcaagtctgtggttggatcacgaatgtctgggacaaggttaccgcctggattgatgagatattggaaagcattaattggtttttgaaaggaaccaaggagttgatagtatggggagtttgcatattggcatcaagttgtgctattggtgttttggaaaaagccttgataggtcttggtttcatatcaggaggtcttgacttggtaaagacttttttgacaggctcagttcttacagggtcatttatgtacctgaaagggtttaagaacgaagagcaagttacttttacagcaatggtttccctcatggcagggatagtgtccacggttattactgcagcttttggttgcccaactgttgtggttgctcaggcaggaccaaatgagctgcttgaaatggccgcgaatggtcttaatgatttttgcaacacaactcttgtttcaatgggtaagacatgccaagctgttaaccaaataaccacatgcgctacaaatttgaaatcgctagctggaaagatattctcgtgccttcagaattttatttggcaaatgtttggtatggaatctcgttttttgcgcgatgcttctcttatgtttgaagaagatcttgaccaatggttgaaggacattacaaaagcccaggacacttttttggctaaagcctatgctactcaagatgatatgatgcaaatgcaagttttagttaggaaaggtcaaaaaatgcgtcagaaggttttgaatgcaaacacgaaattgtcacctgttctcagttctaccattgtaaaaggggttgatactattgaaaagctcttgcgagatgccacatttcagggagttaaagcgacgcgcaaattgccgtttgttgtttatgctcatgggagatcgagagtgggtaaaactcttgtggtcaatagattgatttctgattttcaaacacactttggactgccttctgacacaatttatgctcgcaatccagtggatagttactggtcagggtatagacgacagccttttgttttgatagatgactttggggcggttgaatgtgacccctcaatggaggcacaattgatacccttagtgtctagtgcgccttatcctttgaccatggcgtcaatagaagagaagggattgttgtttgattccaaatttatattctgctcttcaaacagactcgagcctagtcctgagagcaaggtccatgatgatgaagcatttagaaatagaaggcatgttttgattgatgtgtccctcaaccctgacattccctacgatccgagtgatgttaccaaaaaccagatttacacaatacttaagtatgacctcactcaatacattcgagtggcagagtttgctgattatggagatttgcttgcctattgcctgacagcatgggaaaagcatgatatggaacaaactctgaatctggagaaggactatcaggagcccaaacttgacaccgattttgaaaagtttgagcatttactgacaatggcagtaacctacaacaccccgctgacggagctgcaatctctgatgaagatgcgagaggatgaagagtcgcagtatgttcactttgttagttttaggcgagaaggcaaactgtggcactatgctcttaatgggaagatgcaagtatgcgagtggaaacaagaggttacaccagatgaagaacttgttttagaattaaaaagtgaaaaattgttgcttcagtcttacaaggttttgcgatattctgagagcaccaacttggtaattaaaactcacttggatgttttagctagagaggacagttacgatgaaaagatgaatttcattggtatggttggaaaccccaactatcatgctcaaataaagcccattattgacaaaatgccttcatggcaaagactcatcatgtgcggaatgggagcgatgttggcccgaaagaaggaaaccacttggtattcggctatggtagagggtatgaaagacaccatgtacaccatgtatagcaaggagattgaacaatggcctattgccttgaaagtggttgttggtgttgttttggcaagtgttgctggggctggattctggaagctttatgacgttcttaaaaacgccgggaatggaggggcttttgcaggtgccgcagcattggaatttgctgtaggtcagagtcgtaagccaaatcggtatgatgtggcacaatacaaataccgcaacgtgcccataacaagacgagcttgggctcaaggcagcatgcctattgaacacgctactgcagcgattatgacaaaaatcaaagccagcctgcaatatggtcgcactgaagtgcaaatagtgctgttgccaggtagacgtttcttaggatatagccatttctttagggaactgaaaggcagtttgatggttcagatacacactgccaacaaaacatactggcacacatacaaggcccagaacatggagtattttgacaacagtgagttgtgcctttatacagatggttctttggaagatataccaagttcatgctgggatctgttctgttgggactttgaaagcaagcaaatggactcttttccagctgagtttttatcgtgcaaacccgcagtggggactggagcgccacaaccacaatgggcacccatagaagttaaactgcgaaccaagagtttggagatcagagatggcgattatgtacgtcgtgtgcccatctatttggaatatgcagccccaaccgtcaatttcgactgtgggtcgttggtagtagcacgcgttgggactacttatcaagttgttggtattcatgttgccggacataataatagcttgggctttgcagcgttgctacccccagtggctccagttgcccaagcacagtgtgcgcaaaaatactttgaattctatgctcatgaggaggaagtcagaaatggcatagccatggtcggtgaactcaagaatggagtgtggatacctctcccaaccaaaacttctttacaagaaacaccagaggtgtggcaccttgaaacgccgtgcgataagtacccaagtattctttctaatgatgatgagagactcaagatttcaggatgcactgattatgatcctttttctagtggggttctcaaatatgctgaacctatggggctgctggaaacagaattgttggatgaagtttccaacgagattgttgaaacgtggtttgattgtgtcgaagaaggtgaagaatttgaagaagtaagcatggctgaagccttgaatggtatagaaggagtttcatacatggagcgaataccactttccacgtcggaaggttttccccacattttgtctcggaaaaatggtgaaaaaggaaaagggaggtttgtggaaggtgatggaatggaaatgtatctcattcccaacacgagtgtcacaaaagcgctagaggaattggaagctgatttggaaaaccatgttcccacattggttggaattgaatgtccaaaggatgaaaagcttccctatcgaaaagtgtttcaaaaacccaagacgcggtgttttacgattctccctatggaatacaacttactagtgaggaggaaatttcttcgctttgtacggttcattatgagacgaagagacaaacttgcctgtcaagttgggataaatccatacagtatggaatggtcagaactcgctagcaggttgcaggcaaaaggagacaacattttatgctgtgattacagtagttttgatggtctcctgtccaaacaagttatgcgtagtattgctggaatgatcaaccgcctctgtggtggcacagagcgcttgagaaaggagcgtgagaatttgcttatggcatgttgttcacgcttagccatatgtaagaaacaggtttggaaagttgaatgtggcattccatcagggtttcccttaacggtcatttgcaattcgattttcaacgagattctggttaggtacagttataaagcaatattgcgtgagcaaaagataccaaaaatgatttcgttgagttttgatgattatgtctcactggttacctatggggatgacaatttgatcagtgtacatgggtgtgttcgaccatattttgacggcaccaaacttaagcaatttctcggcaaattgaatgtcgtgataactgatggaaaagacaaaacaagtgaacacctcctgtttcgcaagctcacagagtgtgattttttaaagagaggttttctgcaacgttcttccgtggtttgggatgctcctgaggaaaaggcaagtttgtgggcacaattgcattatgtgaataccaacaatttggagctacatgaagcctacaaggtcaatttggtaagtgttttacgtgaattatatatgtgggatccagtagaatgtgcgagttttcgcagaaaagcactaagaaccattagttggttgagcaaagaagatgtaccaacattagagcagattaaggaattctattccattcagcgccagcaaaaattgccagatagtgcagatagtatggatttgcttacgcagaaagaaaatcttggaccaatcttggcaccaacaggcaagcaacatggatttgaatttactgaatacgtgaggactgtcaatttatcggaacatagctttgaagaagctacaagtgaggaactgtggttgctatgcaacacaatgtatcctcagaatcgcctacctgagaatgttatttcagtaaattggcagcaaggtgtaggtagaggaggacttcccacacagcattggatggaagccaatgtgctgcggagaaatagtaacttgaggcgagttgttgacagcgcacttcggggaggaaagaggttagtgatagctactcgtgaagctattttgccatgcaatgtgcttgcgattttgttcatggtacatgccggaacaatacccagagaaacaagcaactctacattgacacaaatcattgaacaagtcaaaacactgggttttttgcccaaggaaatacctgccgccttttaatgatattgttttcttcttagctgtgcatctagatcaacactctttgtgcatttgaagttcgtggaaatgctccagcttggcacagctgcctaggaggtgggactctgggttcataggccaaaataaattatcatcatgcatgttatctttatattccgcattttgatatttttaaaaaaaaaaaaa

SEQ ID NO: 542 - DNA, 7338 bp, Artichoke Italian latent virus
  source 1..7338: mol_type = other DNA
gaaaattactttcaagttctgcattctgtgtacacccactacgttctattgaagttcaggtgacgcctgacaaaacaactttctttgctcacaacgtctacattgaacatttgaatttcgaattttctttgcattgctgcggtaatacagcgtcaatttcactgaaattgagaaaagtcttaacttttcgtgcacttatgcggtcctttgtgaccgtttcccctgatggggattctttttcttttaatttttgtaaatataataatagtttaaataaatttcttttatcttctagtaatttagatgtcgtccttgacgactttgatttttatttttctttttttgtaaaaaaatatattattttagagaatttttggcacaacaggtgcctttctgctcttaccacaccagcgggtgtggtggttaatacgccactttacgtggcttttgctgagcttgctcttgacaagctcaggattaatcccttccaccagctgtgggaggaaacattggccaactggccatgctgtccaggaacttctctcctggatttttgccggactcaatatgagatccgaagggaggctgctgaggcctctgctgaaatcctccgtctgaaggaggttcaacgccaggaggcgttcgatgccgaggtgaaattcctcgagaaaaatggcgttcttcccgcctattcgcgtgaatttgcgcgaaaaatctggtctgctggaaaagaccagaagaaggccaggtctgccctcctggttaaggttaaaaaagggaaacagctcaaacgtgagtgggaggaggcttgcttccgagctcgcgttagggctgagctagcgagggaatttgaaccctcaccccaccaaatccaaagagctattgaagctcaagcttttgctgataagcttgggcggaaatatgccactcttaccgctcgggtgcgagcgaagcgcgctgctgcgcgggccctccgtgagaaggccatctatcttgaggttcaagacctcttgaatgcacccctgctgccacccatggaaaaggtggaaatgattcggaagcatcgcaaagtgcgaccgacgggatccaacgtggtccacactcccaagcgtaatgcgcttgaagacctctgcccataccagggcttgggtgctaaatccgccgatgtgcggtgccaggccaccttgatggctggcaaaatccatgcgacctatcccaggcttgccactgctatctatagctgggtgttgggtccttccatgaggtttgaatgtgtggcccccattaagagttttattaaggggctaaccttcatggttgatttcttccccgaggaagtcctcatctcagagctcaataaaattgaaactgaagctcaatgttttgaggcctctcttgtcgtggaggaggaaagggccaagctggaggcccatgctgagaatgccaactgtcgcgctaatgtatttatgcgtgctatggcaggagtcaagaacatggcaagatgtgcctattctggttttctgtctggttgtgaagaggcagggcggtccctatctgagggaatatgcagtgttatggtagactctttccgcaaatgtgtggagatggtttccaaggagctaggcactgccattgaactaattgagaccatgattcgaaaagtcaagaaatggttcaatgatttattggaaaagctccatgaaggacttgccactctgggcaaatatgcgatgtatgcactcgcaatattgcttggttgtggcttgactaccctccttgagaattgtataggaggaagaggtatcctaacttcactatttgtaagtggagtttttgctgcaattggattgcagtgtgctggaggttgggataacctacagagagagatggtgcagatgtgcacggccctggcagtcgctgtctttgattgccaaaacacgggccgcagaaatgcacaggggcaaccgattgtaagtccaataatggacatccacaatgcccatcatcttgaggatagacgtaccagaagaatgactgatgaacagggaaatcttagatccatcccagtcatctctggtataataaatgctatgtcgcagtttggtaccggtttgtgctctatgcagtctgcctctcttattgagattggcaagataggagccgcgtgccattctatgcgcatggggaaagaagccttgaaggaattctgctccaccataatgtattatttggggagagttgccgataaggtcactggacgagagacagtttttttcgacgaactgtcttctttggtaaaagtaaatgtccgtagttggatacttcaagcacagtcctgtgtgcgagaatcattccatacggaaattggcaatgcatacttccgcgatatggttgccaagctagtcgaagagggccaatcgatccagatgggggttaatggtctaccgcggaaaatttccgctgattatggtcagctcgttggacagatcatgaaagatctactggaactccataagagaaccattcgagctggaatcagtgaaggtcgtcgccctgagcctgtatggatatatctatttgggcagcgacactgtggtaaatcgaacttcatgtcaaccctcgataatgaattgtcaaaatattttgggttgccgaataccacagcacacaggaatggcaaggaccaatttttctctggttataatggtcaaaccttcttgcacattgatgatctatcatgtgtgaagttggatcctcctttggaggctgaattgatcaatctggtttcttgccaggatgtgcccctcaatatggccgatcttgctgataagcccatatatttcaggagtccttttattattacttctagtaattttgaggacctgcctgcggccacaggggtgagagatgtggaggcctatcgtgcgcgtaaagcatgtctgattgaaatgcgccgtaagcctggtgttgtctatgatccggacaatgctctggcggcctcacaagcccgttttaaggatcccatgtcccagatgctcatgcctggcatggatgaagagacctcctggatggaaatgtctgatgttattacggaggttctaaatatctcagcgcgccatagagctgcacaagataaattgcaagcgcgttttctgagagaaaaagccatgagtgatcctcttgcacttgcatcggagaaatttttgcaaggggatgtgaaaaactgttatcttgacttttctggtattgaactggaaaaagcaggaatccctcgcccacaaggcggtaggggactctatgttgatgggaaagtctaccttttagatgatctctgtcagctagaagagttggagatagcagaggaaggatataagcgactctgggaggaacgtatgcgtctgaaatttcttccaagggtgcaggcaaaacaaatactgaatacctcctctatggtggttacagggtttttgcgctccttggtgaatggagactgtgcggttctctcagtagactctttgtccactggggccactgttggccagaaatcaatcttccatgggctacgcgctgatgagagaatctatttgcgtgttttgcagcaccaattagatttatattccatggagattccagagaatccctatagcaattctgcctggttaaaaatactcagggctataggggccggcagagactttctcgtgaaccatggttgtggtattcttatggttgctgcagccctgtgtttgattctggttgccggttttggcttctggaagctttttgttggactttttagtggttccatgtccttgggatctgccattgtcggcttttccgcagtcgacataaaggcacaacataaatcttccagtcaagaaggaggatatcgggctagaaacatcccgatacatcaccgatacgcatatgccaaatctcaggcaggtgatggactcttaccagctgcgcgactttgtgttgccatatatcagccgggagggggttttgtttccgcaatgcaatataagaacaaatccgtgcgaatgacaaggcaccaagcattgcgttttaaagaaggtgaacagcttagtgtaatttttgccagtacaggtgagtccaaactcatcaactggcataaatatcacatgagagaggagcccaactcggagattgttacttggctagctcctagtttacctgcccttagtccggatcttaaagatctatttctggaggacaaggaggtggaattgcccaaccactttaaaacaattgggtatgtcctgagagttgacagcacagcgtttcattatgatatgcttgatacttacgctgctgtcgacaaaactcccctcccactgaagggggtgttgggtagtgaactctatttgcatgagatccctgagaagctcacatttcattatgaatcgagaaatgatgattgtgggatgattctgactgcacaaatcagagggaaaatgcgagtagtgggtatgcttgttgctggtaaggagaagaccagctgggctgatattatgccaccaaactccttagctgaactcaagagccaaattgaatatattcctgagttcggagaggcgtgtgatggccattttaaggttggctacgttggaaaagctgacgcgcccacactaccaaaaaagaccaatatggtgcctgtccctgctcatctgagggtaccatgtgaggtcccaatcaaggagcctgcagtgttgactaaagaagatccacgctgtcctgcaggtgtaaatccgcctattgctgctttgaagaagaaattcactcaaccaatggcggaattggagcaagaaatcctcgatgaggttgccacggatatccttgagacgtggtatgattgtgaggaccatgtcctctccgacattccattggaagttgccatcaatgggattcctgctgatagcgaggaggcagaattggaaaattttgtcatgaagacatctcctggctacccctatttcaagaacaatagagctgaaaagcttaagggtaaatctgcatattttgaagaggcggaagatggtaccctaaagttgaaagaagggggaatggcagctgaactccacgaaaacctggtggaattcacaaagaacgaggttccggaattggttgtaatcgaatgtaccaaggacgagttgcttccggaacgaaaaatcaaggttggcgcctgtaggttgtttgagataatgcccctgcattataatctctttttgcgccagaaaacttgtgccttcacacaatttctacaacacaataggcacaagttaccttgtcaggttgggacgaatccctattctcgcgagtggggtcacatgttaaatcgcctcatgcgcgtcaaaaccaacgaggccataaactgtgattacagtgggtttgatggacttttgaatgctcaggtgatagagtgcattgctaagatgataaatcggttatatgcactctctggggaatcagaggttcaacaggctcagcgttataatatgctgatggctcttgttggtagatatgctttcgtagggcagaaggtatataaagtaaattgtggattgccctccgggtttgcactgacggtggttgtgaactcggtgtttaatgagattttgatccgttatgcctacaaaaagttggcaccaacacctgagcgaaatagatttaatagcactgtttgcttgttggtttacggagatgataatctcatttctgtatcaccgtccatagcctcttggtttactggggaggccatccgtatcactctcaaggagaaaaatgtcaaaattactgatggaagtgataaggatgcgcctaccatagaggcgaagagtttttgggagctggactttttgaaaagaaagtttttaaagcttgacaatggtattgtccaggctccccttgatcggtcagccattttctccagtttgtattggttgacccccgataaatccaaattccacgagtcccaaaaagcaagtgactaccagggagaagtggatgttgtagaggagctcattctgaacgtgaatgttgctttgatggagctctatctacacaatgatcctgctgaatttcagagagtgcgcggattttatgtgaaaactctacctttactggtgagtcaattgcgcacatggtctttctgtgaggcctttcattcccaacaacaaacgggaatgttgaagtatgatccagcagtgatccttgaccacatgtccggtgcagattttaagaaattcatgcatgtatcggaacaaggaaacaaagcccacttctacactgatatattgggagtttctggtcctcactacaagccacaggagaatgactttgtcgtctctacacttcctctgaagatgggagtggctggtgagcatgttccggtccagtttggcaccggcattggtggtttacccacaaagaagtgggtgggggattttggtaggccttcacgactgaaaaatgcgaaaggctaccttatctacaatttgctgcgagagcaagttgaggcaggaaaacgacttatttttatgggtcctgccccctatgtcgcaaataatgcggcattgatctcgtttgggacagcagctaaaatgctcgtccagaaggatgcccttgtctactatcggaatgttattcctgaggcaacctctggtctggagcaatattttgatgctcccttgcccactgccaccgttggtacattttactttgccaacggagaaacatatgctgctctctgcgagtttaaggatggtaaagtactcaattatgagggactaccaacccagtgcctgaatcaggccgtgaaagagaggaagctaccatgcatggcagcagggcaggtgaggaacaaatttattgtgtcccttgtctgtgataatacaatgtgcccacaccatagatccaccaggcaaagctatgaggaagccttccgtgagtgttggacttctaaatgcaagacaagtgcttgtgtggtgtcaaagtggtatggcacgaaactttcttaggcatttctcaaagagaatatcccttcttgacaatctgaagtaaaacgagtcgtttggtgctaggataaccaatctaaaataacctagctttgatcagtgcttagacctttgtggctgatctcatatttaaggtcatgtaattttatttgcttagattactttaatttctgttgtgtgtttaatttctgttttcagtggcgacggatacggtttgtccttttacgtattctgccttgttggacacaaaaagattttctctttcttttgtatttgataaaatgttttcttcagaaaagca

SEQ ID NO: 543 - DNA, 7960 bp, Blueberry latent spherical virus
  source 1..7960: mol_type = other DNA
ttgaaaacagtggtgtgttttctatttcttgcccttttgtttctttattttcatttgtattatggaatatctttctcgttctcagctgaaaccccgtgggggcaaggttccttgtggggtcgtcccacgcgctgtcttggaagcctctaggcttgccaagactatattggcaaaacctgccaatttttctcttaccttcttggctcagggtgcctccctgaagccacgttctgttgcactagcttgtgcaaacggggtcattgccactggccctggtttctgcatctataccccagagggtattcccctttcttggggagatgcagctcgccgggtgaagcccttctgtagggccctggccaagtctgaatctggtctttaccagaagatgactgaagaacttgctttccgcaagttccagaggcaagtgcctcatatggtagccgccagcaagcggctatcagcccgcaagcaagcctcgcgggcaaagggtgctgcaaccgttgcagcacgatcagcagcagcaactgctgagttggaagctcgtcgcgccgctggtgcgaccaagaagagtgctcttcgcagggcactcaagaaaaaggccaccaaaaaggtggtctctgcctctgcagcaatgcagagaggggagccaactcttggctccatttttcctttttcttcctctctctttgagagggtttctgtacgccccttgggcgtcccttttaatcctcctcaacgggaggattttctttcttcttcctcccccattcctgcatgcccaggaatgggtatagcttctctcccccttatggggagaattctttctcttgctccccaagtggagcaactttgtgaactttgcgctccaggcgcgggttcttctttttcttccgcagttgcggatctcgcttcttcttctactcttcatgagcgagatgtttttttccgagctatggtagcaatatcacagctcttttccgcttttcccaatgcatatattcttgggaattttgtaggatttcatttttataattgtgaagctatattgaatttggttgaacaagccaattctatggctttatattatatttgtctttttaaacagggtccaattgtacatagtttcttggattccttttctgatgttgcctcacatatttctggagctgccagaattgtgggcaatgttgtaaaaaatttttcttcttctatttttgattccattcttaacaaatgtgaatcaattttctttaaaattctttcgccttatatggcaactttgcattcttccaaagtcgaaattgtaaatttttggaaaaaatgtaaagattgggccacaaatttgtgggccaatgcacaccttgctcttcaagggttaggtatgtatgctatttgggcattagttttaatgattctttgtggcattgtctatcttttagagacaatgttcataactgctggagctataagttctcatggcttattagtttcaggctttctgtgtttggtgatggcagcttgtggctacactgttttcgcagtgggcaaagaatcagcccaaatgattcgggttatgcgtgagtgtattctcatggctgtgatacccgatgatgtcgtcaaagatatagctgcaataccagctccaggagagcaacaggtacatagtcttttagatgctgctatggtacctattaaatttttagattctttagcttctggtttatccctattttctacaagttcggttaccgtcttgggaaagttgggaaattctttggaaggaatccgcaaaggttataattgtttagcggattttatttctatttttttgaattataccggtgtttgctgggaagctgtctctggaaagaagacatctttctttcgtgatttagcgaccaccgttaaaataaatgtagctaattggactgaagatgctagacgtctcattgaatatcatgagatggctggtcttcttgataagtttgagtacgagaaagttcgcactcttatttatcagggagaggaaatggtcgatatagctaataaaggtcgatcatcccatacttcaacttcttttttgcggaccgttggttcgcttttgaatgatttgagagatgtccgtgccaagtgtgcacggtccttacgttttgacggctggaggcgccaaccattttgggtgtatatatttggtgcttcacagtgtgggaaatcaacattggcaaattatttggcgccattgttgttaacacatatggggtgggatgctcatgatgtatattctaaagatcccactgaatcttattggagtggatattatcagcagaaatgcttaaagatgaatgatttatctgctgtgatacctcgaaacaatgtgcctttagagcaacaattgataccactcatttctactgaagagaagatggtatcagctgctgaatgtgagggcaaaggcatacaatttctgtccgagatagccatttcttcctctaatgttgaagatgctcctactgctgctgagcttattgatggaaatgcttatcgcctaagacgaaaagtgtttctacgctgtcggagagctgcagtatgggtacatgacgataagggaaatcgtactgaagcaatagatgctgagggacagataatcaatcgtgattacaatcccagtgatgcactagattgtgtagaagtacaatggctacattctagcacaggactcccgttaccaggtcctccagggcaatggcacatggctacctcaacaattccattgattaaggatgctatggatgcccatttcctccaggaagacattaagcgagatgcctgggttcagcaaaccgatatgaaatctaagacgggaagagaagtttcttcttacttgtctggattgatgggtgcgctaggctcatataaggcaatacaacggagttcagaaacttcagaagcgggagaacgtaagttcctcgttgctgttgatggacagatttattctttagatagtcaaggagtagctacattagaagcaaatgatgcttatgacaatgtagaagctttagaggctgtctcactaaatcaatatagattagatttttctaagcaagttagggaacattgtctactaacttgcaattcttctttccattcttccttagttagggacatattggaagacatgcttgtaaatgatgcttgtattatttctgttaataaaattagcagagataccaagcagatacatcgtgatctttggaaagagctaaaactgagtgagcgggtatttctgcgcatttcacaaaaagctcttaacactcttagggaacaaccgcattttaaggtagaccttaagagccaaattttggattcttttgctgttttccgggacagtattgtagataatagacaaaaaattcttttatttctttcagctattctactggtggggacgttatcatggagctttttatctcttatgaaagccttcctatcaggttcagttggatttgggggtgcacttgcactcaaaaaccaattggatgtacattcttgtgctgcatcaactgcttctgtggcaacttctgtatattcttctaattcaattcctattgtttgggctcaagctgcacgctacgccaatgtacatagttgtctagaagaaaatcataattttaaatattttgaagatggattagcccatttgctagttcgtcttgtaggtagtagtggcataagtgagaacgcaattttatatggtccgcgttcaatagctctttgtgcccaccaaattcggttgtttcctgatcatgaccgagttcagattcattacttggacaggaatcatataccaaaatgctttaattttacatggcactatggtaatgctcttgaacaagacgatacagaggtatgtatataccgagatgatcagcttactcctcttcccgtgtatagtagaaatttatatattccagggggggagaaattagcctcagctgtaaatataaatggagtttgcataaagaaacgtaagttttttcatgctgactctttgacacaggctgagcgccaactggatggagagaccccaattattcgttcatggtctaacgttggggccctctgcactagcaaacagacaatatcgaatccaaaacctggagttgcttatagtcgaacattaaacaggtatttgaattcgacctatgctagtggtgtacatgatagtggaggacttattaccactatcaaagatggagtccgaaaagttgttggcctccatgtagcaggcacccaagagggacatctttttaagtccacggttgcctttctccccactggaagttttgcagatatccattctggggaagatttttttgttccagagagtgggatcgaaactgcaggatatgtaaagattggatatatcaaaaatcctgcacttcgacctcatgtctctaccacttctcaaataggtagggttactcctaatttatgtattcctttacctacctataatatagacgatgatgagcatttcgtagatgctgatgaagtttttgagatcaaagagaatgcaattctttcaaagaaagatgagcgtttaaaagatttgatttcaaatcctgaggccttcaatcctttgcaagatggcatggttaaatttgctaatccaatgttgcctcttgatgaagagattttagaaaaagtttgtgatgatatgttcgatacttggtatgatatgttgccacaaactgatatgggtgctccccagtttctccaaaaagttgatttagatatcgctttaaatggcatccctgatgatgcttgcatggaagcaatgaaactcgacacttcagagggttatccacactgtgttgagcgagctccaggagaatctggaaaacgtcgttttgtagaagtagatgatacttttcatgtctctttaaaggaagggaccaaagtatatgaaaattatcataatttatctaacactatttcaaaaaatattcccgtcttgaattgtgtagaatgtttgaaggatgaatgtcttaagaaaaggaaagtggccactccacgcctttttgatgttctaccctttgaacataatattcttttgcgtgaatattttttgagtttttccgcatttttacaacactgtaggattcagttgccgtgctgtattggagtaaatgtatattcgagagagtggacaacactctatgatcggttacgtgagtactctgatacaggtctcaactgtgattacagtaaatttgatggctacatttcgcaccaaatatatgggtggttggctgcaaccattaaccgtctctatagagatggtgtggaagcaaatgctgctcgtaataatttgttactcatgtttattggtcgtcgctcaatttgtggtggccaagtatacatggttaatggtggaatgccatcaggctgtgctttcacagccatgatcaattctttatttaacgaaattttaattagatatgtttttaggaagtgtactcctgcacccatgaaaaatttttttaattcatatgtgcggttgatggtgtatggagatgataatcttatttccattaaggaggaagcaattccatactttgatggacccatcattaaaaatgagcttgcgcaagtaggtgtcattattactgatgggactgataaaacatcccctacacttcaacggaaacctctagagtctctcgattttttgaagagaggttttagacgtttatccacagggatagttatagctcccttagataaaacttccttatatactaggttatattattctacagctggagatgatggctactgcaatttagatgtcttgcgtgccaatgtcaaaagttttctggaagagattgttttacacccaaatcatgtaaatgaattttttcgggtgcgatcttttttccttaaaaagattccagcttgggctgacttcctgcccacatatgctgctgctcaagattttcattataggcagcaacaaacacagtcaccatatttggtaccgcgcattttagagacgcgccctatggggactgaatataaaatgatggctggtcaagataatcatgataatattgtatggttgaccagtcgagtcgctatttgtggtccaaagtatccagttccctctggaccactacactttgtagttgctctctcttcatttgtgcgaacatgtgaacgtggagttaattacaaagttgatattgctgagggttcaggtcaactaccaacacagagttggactgattccttcagcagttctaaaaagagaactgcgctccacaccgcttatggcgatggagctactatatatttccggtctgtcatgccttattatagttcatggtgtgcagccggtagatttctaaaatcacagggcatttccacaagtagtgtaattgccctgtttgaacaatataaaccagcaaatgctggtaatattgcccctttgttggctacaaaggaatataggcgttatagccatagaccaatatttgatttatcaagtattaagcagcatttagctgcttcgtaatctgaggcgggttctcagaggcttcctttcttgcctaaagatgggggtgttgtggtcctaaaccacttccaagagggcgtcatcgcttagcattttacctaagggttgaagatgtgaatattggagtaatgccccaatagtcctctgcttttgcagtaccaagaaattacttggtcttggaggtctcagttccgattctaactgagtgctttttgatatggttcaagaaccaatcccgactatggtatggttggactgtattatatatgtagaacttgtatattgctcattacatttaatgcgtgaattcattaatagcgcttaaattgtggtgatatacagggtatgttttctacatatctaatatgaaataccaaataactacagagatattgatctgatgggagtgcaattctcctgccaaacttgaggccaaaagagttgatttgctaccttctaagaaaggagattgtcttggtgaaattccaagctctattttaattgctttgtcttcttattttttttagtcaatgaacattggtggtttttgaaaccatccgtgaggactatccacgaagagatagctagaggtacaattaacactctcccctcaataaaaatgagagtgtggctggcgtccaggaattcctggcacagggacatgcgttattccggtaggtaaaatacggaatcgtttttcagctggttttgaccgtgatggaaaaccgcccctcatctttcagagggtatccgcgcattggttttcagtatatgggtactgaaattgtgtagtatgggctacaacaatgtgtggattaagtcttccttttagtaggaatgaagggtccagagtggagagtgaaaccctgggaaccagcttatgttgggaaggtttcgaataccgctcgtaagcccctaatttctgaggtctgggagaagaagcgctttgccaagcgatattggcttaaggtttatgcgacgataatttgttagtgtactcaagagtattcagggtggcccctggtatttggatgaggtccggagatgaaaaccggggggtaattaaccccagctaacggcataagctgactttcatggaagtgtccatgacgcattttaagataggttttagacatacccttccgggatggatgtaattcccatttcgatatttgtgattagttattaatttccctgatgaggggacctaatgctagtaagtgttgctgcactgaaatctataaggttatctgatggtaaacgtatgtttctttttgctttttgtggcgataggctaggtttgtccttttcctggtcttgctaagttggacacaaaaatatttttgttttcaatagagtcgaagaatgtcctttcttccc

SEQ ID NO: 544 - DNA, 7452 bp, Grapevine Bulgarian latent virus
  source 1..7452: mol_type = other DNA
ccaagagtggagcatgcgggggggggggacggcccggttgaaaatctcgtgtgtgaatttcttctttgctctcttatttgttgcaacatggcaacttttaagatgggatccgttgtgcttacaccttgttttcttgcaaaagaacgagaactggtgcatcaacttttacgttcgtcttcttcttttgccgttacttttttggctcaaggtgcctccttgaagcccatcatggtggctcgtgccatcattaacggtgtcattgccattgacaccgagaactttggctttgtagaccaaacttggtccgaggctgcacgagtggtgcgccgatattcattggcccactcaaagtactgcaggaaggttcgcgagcgctctgcaaggcgctttgctgaaaggaaagctgccaggaaggcagctggtgtgaaggccgcctgcaagcggatactagcatctcttgatgccgacctcccttgttctgggaggctgatgtgggccattaaaagagcccaccgcgaggatttcgcctcgcgaatgaaaacggcagaaatttgccgtatgatcagagcctccaaaagggaggaaagagcctatagggctcagtatgccgcacttgaagtgcgaagacccgtttcaatgcgggtgccctatgtttgccccctggtggcaaacagagaagaggtggctggggagccacttagaggtcgcgcttttgagcgcaccccacgcagcacttcctttagtgcatctcctctccctcgtatgcggtcaccatatgaggctgaaattgctcctctctttggagcttgtgatcgtgcatcccgtctggagttgcatccagatataaaatttttctttagagaagcgcccaatcatgcttcttctttgggggatgtggaaagccttgctcgcttggcgaggtgtacaattgcgtattttaaactttttccatgcgcattgtactttgagccgctgcgtcgactcaaacctcagagcacaactgatgagattgacaagtgtgcaaatggtctagagatggaactggaccgcctccgtgaaatatcagtttcggatctccatgccaatgggcttggaacgttcatagctggtattgcagctggcgctgctactgccactggagccgttgttggcaccaccgtagctggtggaaagtatctaattgatcacgcagctgcagcttttgataagagctgcaacaaagtggttgaaacagttgaactggccacgcggaagtttggagagaccatgcttgacatggtcaggaaaacattcgactcttgccttggaccttacttggctactgtgtctcacgcccgtgaacaaattgaaacctattggcgtagagtgacacagtggatcaaaacaatgtggagcaagttgtcgattgaagttcaagccctatttgattctacatggtgggctcttggactgatcctctgcgctggggtggttgtgcttgctgagcatatgctggtggccctcggtgtgttaacgcacgccggagctctaacatccttatttatcaccgcatttgtggggtatttgggatggaattttgcagcacccgccacagaagcggaaggaacgttactcaccacattgcgtgccctcgtgcatattgtggttgagaagccaatgtcggtttttcgctcagaccagacagcaaatgctcccaacgttttggagtttccactcagggtgctcgaaacactcggtaacgggttagtttctgcgccccttggacactccaatatgttgggaaatatggagctgctatggatcaatccgcaagggaaagacgccatgaaagatttattgatgtgttttgattgcatagcggattcttgggattatatgactggtcgtaaggatagtttctttcgagaaattgcctcaatgactaaggttgatatagtcccctggatcaagagcgctcagcagattgtgttggaggcacaaactgttgctgtaacggaccctgtccttatggacacgattacacatttactatacaagggtcatatactccaacggacgttggccggtgcgaagcgcgccacttcactcgattacggacgagtcgtgtcttctcttgttcaagagttgactaagattcgcgcccagtgtgcgcgcgcaggcatctttgagggtcggaggtgtgagcctttttggacttacatctacgggccttcgcattgtggaaagtcactttttatggaggaagtgacacggcgtttattgaaagagaatggccatgctcttaatgatatatacgccaaaaatgctcgtgatccatactggtcaggttacttgcgacaggctgctgtacaaattgatgatttatcagcctgcgtaactgaaccttcggtcgagtctgagtttctccaaacaattggatccaaggactacaagcttaacatggctgcggtagaggacaaaggaatgtctttcaatagctccttgttcatcactacatccaatgtgttcactgcgcctaccgacgctagaattttggataaaaacgcttacaacaataggcgtggcgcagtagttcagtgtcgtagagccccaggtgtggactttgatgcaagaaatccttctggatcgtgtgaagcgcggctggtggatcctaatgatgaaacgcctaagtcagagtgggccaattgttccaaagtgctggaggaggtggtgcacttaaataatgcgcatcgtctcaaggagttaatgctcatggctaattaccgagagcgcaatgacactttgcatcctgtgcacagtggagcgcgtaatttcctgagatcctgtaccaagagcttggctctcgggaatttggtctgcgatggagttatatatgtaattgatcgtgagacagcaacatgtgaggccacaaaggagaagccaacaagtggctatgagcagacagcacagcacttcgtcgcttcactccggcaagaaatttcgaaccgggcgtgtgatggaatgttgaacacctttttgaatgggttaattgaaggtccttgtgaagtgaagagcgtagatgccttaaatgaggcagctacgtcttcgcagaaggagtttttccttgaattgcccttactggagagagtgtacctgcgaattttacagaggcagctgtccgcaatccgtgagatgcccgacttcgcctttaacatgaatgtccgggaaaggattttagctagccttagagtaggttataacactgtctgtgaacatggtggcaaattgctaaccatagttgcagcattagttttgattttggttatatattcgtcattcttttgtatatatagaacctccattgctggaccgacagatggtgtagctgcacttgttgcggttggcgcgctaacagctaatgctggtagtgtgtcaagtgtatatagtagctccgatggcggtttgagtaagttttctcgcaacacccctatcaattataggagtgctgcaagcagtgattttcgtgccaatagtggtggggatgacgaatttttgatgtcattactactgtggttggagactccaggtggtggccttatatcgtgtattagagggaagggtcgctacatttatctgaccgcacaccaagcggaacaaattcctgatggtgctcgtgtttttgctcgcacgagatccgccaatggtgttgtacatacagtgcagcttctatgggatgcaaaacaagtcagacgatacagtgacactgaggctgttacctatcatgacgcccgtttcactgccctccctgagcctatcaagagtgcttttgagtgtgatattgatcaactacctactttgtttgatatgaatgtggtattggtcaagcgcaagagtgctatgcgacaggtggatccaacattagctgccctaccagcggagcaacccattattgattgctggaaatccaacgggaagttaaatcgtgagatggtaggttttaatacctacgcttacggtggtagctatcgtaatgagataccagtgtcaattgtatcgaaatgcaagacgtatgctgaagattgtggggcaatacttaccactatgtggaaagggaaacgccgcgtgattggaatgcacgtcgcatcggggtacaaaaatgggacccaaaatccaaaagattggacctcaacagccacccttctcccaggcattgcagatttggagtgtaactccggattgaatatggtggaagagagtggtgttagttatgaggggtacagaaagattggctatttgccacgaatggccgaccgcccttaccaatcagggaaaacaatgttcgttcccgtacctgaagagatgatgtatataccgaccaatttgtcggaaagattctcagatggcacggaacgaaaagtggaagtggagattaagcagccggcaatcctgtctgctagtgatccacgtattcctgagggagtctcctatgatccgttgaaaaatggtatggagaagtttaagaagcccatggatcttctagatgatgctctctgtgcagaaatagctaatgatatagccgagagctggcatgattgttttgactcgttggaggattgttcagatgaagttgccatcaatggtgctgaggatgaattcttcgataagtttaacatgaccacatctgaagggtatccttgggtgaaacagagggggattggagaaagtgggaaattgcgttactttgaggagaccgttaatggtcaacttgcgttgcgtaaagatacacccgtctataaggcataccatgatttgcaagagctttccaaggtagaagtgcctgagctcatttgcattgagacgcctaaggatgagtgtttgccactcaggaaaataaccctaaaacccaaaacacggctcttttccattctgccgctggaaatgaaccttcttctcaggaaaaagtttttatcttttgcggccaatttacagcaaaatagggataaacttccaacacaagttggtgttgatccttattcacgagagtggggccatatttactctcgcctccgttctaaaaattctgtggccgtcaattgtgattatgcttcttttgacggattgattacggcccagattttgaaacatattggaattgccattaattctgtatatgttgggagcccggagtcgaaacgacaaagggcgaatttgctaatggccattgtgaaccgtaagagcatctgcggttcacaagtgtatgaagttgcagcaggtattccttcggggtgtgctttgactgttctgctcaactccattttcaatgagatgctaattcgttacgtttggaaaatttccgtgggtggagtaccacgcgaaatgttttcaacctatgtaactctgattgtgtatggtgatgataatctcatttctgtgcacccagagttcttgccccacttcaatggtatggttattcaagcgaaattgaaagaagtgggggtaacgattacggacgggagtgacaaaactgctgagggcatttacgaaaagccatttgaaaaattggattttcttaaacgccgctttgctaaacaaagtgatggaaccgtccttgctcccctggatttggcgtcgatatttacttctttacagaatgtgacgctaggtgcaggatctattccagaggctgtgcgtattaacgtacatgtggcactcacagaattgtaccttcaccagaaacgtgagtggtatgatgatctgaggaatcactatcaaaaaacccagggttgggagaacctaccaacctgggcgcagtctcatgctttccacagggaacatcttacgggagccttgccctgggcgccacaccgtgtcatggatatcccagtggataagaagaaattgactcaagctatgcaaagtcaaggtggtcttgattttgtagtacaggtcgcagaacgcatttttgtatgtggtcctgcttttcggcctgatgctacagaacaaggctcatttgttgtgagtcatacaggttcattgccgcgtggtctacagggttgtttgagcccagtcgacttcgtgagtgaagggcaaggtcgtttacctactcagttgtgggtaaataaattcaggtcagagcgtcatcacctcacgtgtctcatcagggatgcgtataacagaggttgtaatgtttattttagggcggagcaaccctacatagtgaactggttgagtgcaactagttttgctatgggacttggaaaagactatagggctatattacatttgtatcataatgtatgtacgcctaatgctcagtgccttgacccctattttgaggcaaggcgcttccagcgggtggacgcttatgttgcaccccctttccatcataggagataattcggtccctgcccgttgcagggggtctagcccgccttaagggcttgtgcgggttggcaccgcttagcgaggtgtgaagactggcgtaacgcaccaggagaccccggacttgtgtccgccccatgagcacatgggctgcaaacattttgttggttgttgtataaaaccaactatctttattcgtttcagaagaaacgtcatatcttttagtttgaaataaacccacataaactgtcgctaatagggtggcataccgttgagttctttaggacgccttcggttccgtgaaatcggtatacgtgtgaagatagggcagctcttgccagcaaaggagccaggttgttggaacctatttgaatccaaccgcatttgtcagttttagatataactgtccaggtctactgcttccgagcctgttaaaatcttaaagcgcccagcgtccaggaattcctggcatggggacaatgtttaaaacaacattagtaaaatgttttcgtctttgattgtgtgactgtgatggacacatcctctcatctttcagagagtgtgccgctgattagtacctgtgatgtgtgtagttttgaaactaccagagtcctcagtggagaagcgccctcccaaacgatattggcccaaggttcccagaacttaaaattgatggtgtactaaaaaattggggggtcgaacctttctttggggggggtccggggggggggacccggggggggttaacccccccctttggggggggggggccccccaggggggggcccaggggccttttgggggattttttagacaaaaagccccctttatgtgggggggtggggccggggggtgaaatttttttaaaccgggggtggcggccccctttttccaagttggggggggtttccccgggggggggggttttttcacccacccccctgggggggttttttttttttttctttttttggaaaccccgggggccctaaacaaaaaccggggggacccttcaaaaatttaaaaaaaaatatttttttttttttttgggggtttgggttttatttttattttttttttttttttccccaa

SEQ ID NO: 545 - DNA, 7496 bp, Strawberry latent ringspot virus
  source 1..7496: mol_type = other DNA
ttgaaaagcaatctgcgaactttgttactaaatatttcttctaaagctatcctgtattttgatacagacccctttcgcatttcactagctgctgggcctatccagtttgttctgttccttgctattgcttgttttgacaagtattgttcttttgttgtgctgcggttatacagctttccttgtggaatttgagtcttaactcaaacaacattttcttttatcttactctctgtttaaccattttaattttccatgggttactcacgaggttcacgtggtggtgctgataagcccaaactgtgtggaatttgttttgctagctttcctgatgctcaggagaggaagtgccactacaggaagtataactgccgggactctggtggtcaacttggtggccttgttagcacagggcgctgtgcttctgctaaagagagaaatttgaaagttgaggctgataggaaggaactggagtcctcctgtgatgatttcctgactgagcaggatatggagatgacatttatgtcagatctctttgagtttactgaagggttctctggagatcccataactctttgttttgcccaccatattacttatggtcctggagattcttatatctcaaggcccatataccaagcacctggcttggatgtagctgactatgccgcattccagaatgagaaagttaagggtactcagcgcgagttccttactactgatcgcaagtatgatgcggaggttctaacttctgtggttagaactgctattgtgggtggtggtttcggatcaccaaccttcgattacactggtctcggtggcgatggactcaagtaccgatttgattctgacgatctctggtcagaccattctaagggccttggtaggtttgtttctgcgggcttcactgaatcgactaagggatcattggatttaaagttaacattgcaggacgttgatgaaatgacccaagctctttctgatgagtgggctgaatgggtttattttgaagaggatctcgaggaatatttggaggagtatctcaactctaaaattgccctcgctcaagagattcgtgctctaaagcagaaaagaactgttgccctagctcagaaagcttatgaccaagctaaggaaaagcctgctgttgagagacccatctccccagatactgttcttcaatctgccaattcctatctgtctggtaccaaatggtgctacgattctgaggatgaggactatctcccagtagctcctcttgataagttccacaataagaaacatgatattgattttgtggattgttgtgacacagagtatcaaattcagccttcaggcacaatctacacagagacttggttcattgatggctgtctccccggatgttggtttaaaagaggagttgctatcgatgaggcagttgtttgtgagaaactccccttaattgggaaaactcctctggagcttatgattcagtatcaggtggagccaacaggtgatcttctcttggacattcaacgtgcattgtttgcatactatgagaaagaagcacttccaaataagaagtatttcaacttgaatggtgtgccaactatgattgttttggaggattggcgttgtgatctaagatactgtctatacgcaccattcatccaaggagatcaacttaagcacttgatggtggttttaaacgctccattaccaggttggttagttgatttcccaaagaggaggaaatctggggttttgcaagcgagtggttggaatccactgcgctatttctcgaagcaggcaactcttggcttcctcgatggagtgatgactaagctgaaggaacttattggtcctataattaatgctgcctcatttgtctgggatttaatcattaaggccaaagattgggcttttaaagcacttgaagatatgattgagaagcgtggtgaaatattaaaggctcttctccagcccctattgtatgtgtgtggtctccttcttttcctgggttctctgaagggcttgaagactattgttgagtcatttggtattccacttgccattttgacgggcgctgcaatcggccttggtgtgtatgttcttgttacattcttggggcaggctcatatgggtgccctcaagaggtcaaccaagatttgggaccttgttcagaattgggataaaccttctgaagttaaatgcattgatgagcaaatcattgaggttttggtggaggaaagtcctgacaaagaggagtgggttcgagagttactagcttcaccgcattatgttcctgaatgtgttattgatcttactcatatgaaggatttactctccccacagaagtgcgctaatttcaagcaagcctttgaggtgggtgcaagtgaggcctcttctcctggaatgctctttggatctggctttatttggaagatcttgctcctcttgtgtcccctttccatgtttggagtttcaaaaactctatcatgtgcgaaggatctgattactattcaagggggccaagatgctgctggacgctttttccaggatattgttggtggcacccaggaggtcttctacacaatcactggtgagaagagtgagtttctggattatatttatgccacagttggtgtggatttccaggcttggcgtgctgaggttctggagctaacaacagcgactcctacctcaatcttcctgggtcctcaagagcgtcttaagagactccgtgcttgcaaggataaggctgatcggctcatccttcagatggactcgcgaaaggttcctggggcttatataacacatttcaatagccttctgcaatccttggatagagctttagtggaatgccaacaagctctttccgttggtaaatggaggaagacgcctgcttgcatttggctttatggtgattctcatgttgggaaatctgtttgctcacagtacttgattgatgatgttctagattctcttgattatgcacagactggtagggttttttcccgtaatggtagtgactctttctggtcctgttacaagaatcagagtgctgttttgtacgatgattttggagctgtctctgagggtggtcattttgatgaagcggagattataagactgatagcccctgctcccttacccctgaatatgccaaatttggaagcaaaggggaatacctgctgtacatcagattttgtgttcattacagccaatcaagctggtttaactccgtctgctgttattcattgtaaaaaagcatttgagaacaggcgattgatcttggccgaggttacagcagtagaaggtggccgctatcgtgacagatacagattcacgattcaccagaagaatgagccatatgctagagatgaccgtttccaggtgatgaattatgaccaattcatgcagtatgtggtaaatcaatcaaaggaccacttctcagagcaagttgatctgcgtgatgctcctcatacacaaatatttgctgcagctgaccagattgctgctgaagctgaggagggtttcaagacggctggtataactattcccttctgtatgcttaaatgtatcgaggggagaatggtgacgtactatgatgaagagaaattcactgaaatgacagtagaattatccgaaactgatgcagatatcatccactcgcgccttgatccacaaatgataacgcagaggcttcagatgcttctacccaaggctgcctatgtcaatttgaagaatcactttggtcttggaacagatccgtttgagcagcccaatccttactttaactgttcgcaacgggcaaaggttattggacgatttttgaagcctaaggtcacggaggcccaactcgaaaccagcaagcgtggttttcttcaggtgactaaggagctagcacaaggagcttgtagagctatatctgatgccccctttctggtaaaacttttactgggatttggtgctttgtactttgtgggtctcccaattttgggttggttaaagagcttgtactctgctccttccttgatgacatttgcagcattgggaactatgagagcctcgggttcgttatcgagttcacaggatcaggaaacaaggcgaacagcctctgggcgtgagagaagacgttacctgttagaggcttcaggtccgggagctctggaagccaagccccaagatgttgaaactgagctggcatcactgtccaagcatttggtcggtttcaccagtatcgactttcctgatcatcattatcgaggaatagcccttggtggtactagggttttaatggtctatcatgtttggctggaactacatagtggttgttacaaagtgggttctctctcgaaaacctttcctttcaccgttaatcgaaagaactgcaaattccagcggataggattgaaggatttggttattgttgactttcctcctacttttgtgtcctttccagttctcaagctggaaaaatggttgcttgcctctcatgatccgttcatggcaggttccgggtggtttatggaaatggttttccaacggaatggagtcttggaagtagctcgagaagaggcggactatactctcctcgatacacatgatgtttacgatgccgcctttcttaagggggttgggctcaacaagtgtgtgaggtacactatctgtgatgatgccggtactggctatcggaatgattttttctatgtttcacagtgtggcacaccccttgttgctaactatggtaaaggaaagggcctaaagatagcttctatccatgtggttcaccacttctcagctactgagaaggatactattatagctggctctggtagcttgctcacaaaagaggaatatctcgaggctagtttgctgctcggggatattaaacaccctcttgagactgaccgtattcaggcatcgggttgcttatctggggatgaattttttgatgctgagacagttttccctgaaggactcctacttccttcccaagcccctcgccaggccacaagtagtgagattcataagagctccatttcggatggtttggaaaagctggttggagagaagaggaaaacagagcctgccatcatcagcaatcgggatactcgccttaaagatcgcaatctggatatcttcaagaagggcatgatgaagtacaaagctgttgctgcagacatgagcccagttacagatgaagaggagaaaatttggaatgtgacttgggatagtatctttgaccttcctggtggcatccagagtaagtgtcatttactctcggaagatgagaatctcaatggagtgaacggagataatgagtaccgtgggatggttgtctcaaccagtgaaggctggccagaagttttgaacaggaaaaatggtgaggcaggaaaggaaagatttcttcttggcctgcctggatgctacacgttgaatcgtaatcttcctatgtaccaaaggatattggatttggatgctctgagtgcaaccacaataccctgtattgttggattggatactgccaaagatgagagactcccactttccaagatataccaagatgttaaaactcgcctctttaccattctcccgatggagtataattacttggtgcgaaagtattttggttcctttgttgcagagctaatgaagttacacaattgcataccaacaaaagtgggaatcaaccctcttggttatgactggacaatccttggaaagaagatgcatgccaaaggaaccaactggttcaatggggattattcccggtttgatggtgtcacaccacggtgccttctgattgaaatttccaatagaatcacaaaactttacggtgatgagcatcgggaaagaaggctccatttgatgttggcagcaacaacgaggcttggtgtggcgggtattggtctttatcgggtctcagggggcattccacccggtttcgcccttacggttatagttaattcattggtcaaccactttttggttagatggagttgggagcacatgatggctagttcctcccttttcttcacagattgtgttgagctcgctgtggttggggatgacaatttagttagtgtgaaacaggttgccgctgaggatttcaacttgaagaaattatctgcatttctggcaggttttggtttcaccctgaaggatggttctgataagaataaggaaatcctacctgagtttaacccaccggagaagtgtgatttcctgaaacgatgtttcaaagctcgaggagatcgttatctggcacctctttcatggctctctctctctgagtcattacactgggttcgtgagacaaatatgacaaatgctgctgcaacccagaataatgtagagggattcctgagagaacttttccactatggtgataaagagctgtattgcaagtggaggagagatcttatctctttatgtgctgagaatagagttccccatccaactagctactcttttgaagagttggagcgttcctggttatccgggaaaactgtggcttctatctttgaaaaggaggagccagagattgtggttctgaaagatgctgcttcggatgttgccccgaatgtacatattgttccagctcagacatgcctcaagtggaaacccaatgaggtgccaactgtggtttggtgtggtcctaactgtccgaatcagcttaggaatgccaatggttgcttccttattcaggcaccacagggctctcgttatcctctccgaagcacagtaagaaattcactgaagagggtacatcagcgttccgatgaggtttattttgctggggctttagaccaatctttagttcattgggttgccgccttttatgcctctatgtatcgtgagtcctttagtcactcaaagtacatggcagcatattttggggataatgataaaggacttctggaggcagtcactgcagctaagggttggtgattcgctcttcttcctcccttcttttcttaggcatttctcaaggagaatatccctggcccagatgggctttgaaaaggcaagccggtgaactttatgtgtcactaccatggaactacatggtttagggtccttaatcagtcccttggttacttttacctcttcattgtccatgtgttgaggctgactttaattagttggatctttggacccctcctcgggttattaggtaagctgtaagcaagcagccgctagcgttctggaataccaggcatagtgaggttcagtggcagaacaacgacgccacacgcttgtagaccgtatgatagcctacttttatgtgcttttgtagtttagtgcctcctgatgttatctctttgttgagttgtacgtcatttgttatgccaaattgctttcgtgtgttttcttgagcctctcatgtcttccttcattggatgtacgtgatagttatgctcttcgctttcttttgtgtttaataaaggattaaccaggcatcctcccaggtttcaccgggtttagttctggcacttagaataagcttt

SEQ ID NO: 546 - DNA, 95 bp, Currant latent virus
  source 1..95: mol_type = other DNA
agtgattgaagtctaatattttgtttgaactctcaatttctctcaattcacctttttctacatcattctcgctaccgataaactttgaattcatt

SEQ ID NO: 547 - DNA, 214 bp, Arabidopsis latent virus 1
  source 1..214: mol_type = other DNA
caaaatttttaatagaacacgatcaggaccagggtccgaactgttactttgttacattcaagttatttgcaatttgtgatcaaacttatttatcgaaccttagatgtctgccagtactggagaggactaaggaagtttagatccatctgtttttgcatacattgttgagtattatcgttaagaaaggaaattttagctttgattcattaaaata

SEQ ID NO: 548 - DNA, 197 bp, Artichoke Italian latent virus
  source 1..197: mol_type = other DNA
gaaaattactttcaagttctgcattctgtgtacacccactacgttctattgaagttcaggtgacgcctgacaaaacaactttctttgctcacaacgtctacattgaacatttgaatttcgaattttctttgcattgctgcggtaatacagcgtcaatttcactgaaattgagaaaagtcttaacttttcgtgcactt

SEQ ID NO: 549 - DNA, 61 bp, Blueberry latent spherical virus
  source 1..61: mol_type = other DNA
ttgaaaacagtggtgtgttttctatttcttgcccttttgtttctttattttcatttgtatt

SEQ ID NO: 550 - DNA, 87 bp, Grapevine Bulgarian latent virus
  source 1..87: mol_type = other DNA
ccaagagtggagcatgcgggggggggggacggcccggttgaaaatctcgtgtgtgaatttcttctttgctctcttatttgttgcaac

SEQ ID NO: 551 - DNA, 252 bp, Strawberry latent ringspot virus
  source 1..252: mol_type = other DNA
ttgaaaagcaatctgcgaactttgttactaaatatttcttctaaagctatcctgtattttgatacagacccctttcgcatttcactagctgctgggcctatccagtttgttctgttccttgctattgcttgttttgacaagtattgttcttttgttgtgctgcggttatacagctttccttgtggaatttgagtcttaactcaaacaacattttcttttatcttactctctgtttaaccattttaattttcc

SEQ ID NO: 552 - DNA, 133 bp, Currant latent virus
  source 1..133: mol_type = other DNA
tttacttggctttgttttgagtcttttgtttttgtttgtcccaactatgttgtggacctaatggggtttgctagtttacccattagtctttcttctagcatcaaaaatattttagagtctgcattgtccatgc

SEQ ID NO: 553 - DNA, 186 bp, Arabidopsis latent virus 1
  source 1..186: mol_type = other DNA
tgatattgttttcttcttagctgtgcatctagatcaacactctttgtgcatttgaagttcgtggaaatgctccagcttggcacagctgcctaggaggtgggactctgggttcataggccaaaataaattatcatcatgcatgttatctttatattccgcattttgatatttttaaaaaaaaaaaaa

SEQ ID NO: 554 - DNA, 298 bp, Artichoke Italian latent virus
  source 1..298: mol_type = other DNA
gcatttctcaaagagaatatcccttcttgacaatctgaagtaaaacgagtcgtttggtgctaggataaccaatctaaaataacctagctttgatcagtgcttagacctttgtggctgatctcatatttaaggtcatgtaattttatttgcttagattactttaatttctgttgtgtgtttaatttctgttttcagtggcgacggatacggtttgtccttttacgtattctgccttgttggacacaaaaagattttctctttcttttgtatttgataaaatgttttcttcagaaaagca

SEQ ID NO: 555 - DNA, 1380 bp, Blueberry latent spherical virus
  source 1..1380: mol_type = other DNA
tctgaggcgggttctcagaggcttcctttcttgcctaaagatgggggtgttgtggtcctaaaccacttccaagagggcgtcatcgcttagcattttacctaagggttgaagatgtgaatattggagtaatgccccaatagtcctctgcttttgcagtaccaagaaattacttggtcttggaggtctcagttccgattctaactgagtgctttttgatatggttcaagaaccaatcccgactatggtatggttggactgtattatatatgtagaacttgtatattgctcattacatttaatgcgtgaattcattaatagcgcttaaattgtggtgatatacagggtatgttttctacatatctaatatgaaataccaaataactacagagatattgatctgatgggagtgcaattctcctgccaaacttgaggccaaaagagttgatttgctaccttctaagaaaggagattgtcttggtgaaattccaagctctattttaattgctttgtcttcttattttttttagtcaatgaacattggtggtttttgaaaccatccgtgaggactatccacgaagagatagctagaggtacaattaacactctcccctcaataaaaatgagagtgtggctggcgtccaggaattcctggcacagggacatgcgttattccggtaggtaaaatacggaatcgtttttcagctggttttgaccgtgatggaaaaccgcccctcatctttcagagggtatccgcgcattggttttcagtatatgggtactgaaattgtgtagtatgggctacaacaatgtgtggattaagtcttccttttagtaggaatgaagggtccagagtggagagtgaaaccctgggaaccagcttatgttgggaaggtttcgaataccgctcgtaagcccctaatttctgaggtctgggagaagaagcgctttgccaagcgatattggcttaaggtttatgcgacgataatttgttagtgtactcaagagtattcagggtggcccctggtatttggatgaggtccggagatgaaaaccggggggtaattaaccccagctaacggcataagctgactttcatggaagtgtccatgacgcattttaagataggttttagacatacccttccgggatggatgtaattcccatttcgatatttgtgattagttattaatttccctgatgaggggacctaatgctagtaagtgttgctgcactgaaatctataaggttatctgatggtaaacgtatgtttctttttgctttttgtggcgataggctaggtttgtccttttcctggtcttgctaagttggacacaaaaatatttttgttttcaatagagtcgaagaatgtcctttcttccc

SEQ ID NO: 556 - DNA, 1077 bp, Grapevine Bulgarian latent virus
  source 1..1077: mol_type = other DNA
ttcggtccctgcccgttgcagggggtctagcccgccttaagggcttgtgcgggttggcaccgcttagcgaggtgtgaagactggcgtaacgcaccaggagaccccggacttgtgtccgccccatgagcacatgggctgcaaacattttgttggttgttgtataaaaccaactatctttattcgtttcagaagaaacgtcatatcttttagtttgaaataaacccacataaactgtcgctaatagggtggcataccgttgagttctttaggacgccttcggttccgtgaaatcggtatacgtgtgaagatagggcagctcttgccagcaaaggagccaggttgttggaacctatttgaatccaaccgcatttgtcagttttagatataactgtccaggtctactgcttccgagcctgttaaaatcttaaagcgcccagcgtccaggaattcctggcatggggacaatgtttaaaacaacattagtaaaatgttttcgtctttgattgtgtgactgtgatggacacatcctctcatctttcagagagtgtgccgctgattagtacctgtgatgtgtgtagttttgaaactaccagagtcctcagtggagaagcgccctcccaaacgatattggcccaaggttcccagaacttaaaattgatggtgtactaaaaaattggggggtcgaacctttctttggggggggtccggggggggggacccggggggggttaacccccccctttggggggggggggccccccaggggggggcccaggggccttttgggggattttttagacaaaaagccccctttatgtgggggggtggggccggggggtgaaatttttttaaaccgggggtggcggccccctttttccaagttggggggggtttccccgggggggggggttttttcacccacccccctgggggggttttttttttttttctttttttggaaaccccgggggccctaaacaaaaaccggggggacccttcaaaaatttaaaaaaaaatatttttttttttttttgggggtttgggttttatttttattttttttttttttttccccaa

SEQ ID NO: 557 - DNA, 560 bp, Strawberry latent ringspot virus
  source 1..560: mol_type = other DNA
ttcgctcttcttcctcccttcttttcttaggcatttctcaaggagaatatccctggcccagatgggctttgaaaaggcaagccggtgaactttatgtgtcactaccatggaactacatggtttagggtccttaatcagtcccttggttacttttacctcttcattgtccatgtgttgaggctgactttaattagttggatctttggacccctcctcgggttattaggtaagctgtaagcaagcagccgctagcgttctggaataccaggcatagtgaggttcagtggcagaacaacgacgccacacgcttgtagaccgtatgatagcctacttttatgtgcttttgtagtttagtgcctcctgatgttatctctttgttgagttgtacgtcatttgttatgccaaattgctttcgtgtgttttcttgagcctctcatgtcttccttcattggatgtacgtgatagttatgctcttcgctttcttttgtgtttaataaaggattaaccaggcatcctcccaggtttcaccgggtttagttctggcacttagaataagcttt

SEQ ID NO: 558 - protein, 2079 aa, Apple latent spherical virus
MDEGSCCPRSQIQTRSQREARRKAWEASEEAAWVRDYGREPTSPLSVWEGTPELLAMEHAYLAKQGDKRICAHLRRQALRAAYKARCQKRAFKVFQEECEFFRLPVHIVDKIQIPGQASPVPESVSLGGGVKTATSKRQVKTRRSFSSFLPKEEFSFVLGPCPTSSPEVTPTSTPSTTPPSSPRASSPRTPLPQVKEVTTQGITLCSHGPACQEHFCFGFLDLKDEFHASTYLKWMLGTQLPGSIFCFDLQVSSYLEHCTDTMEAIDLWWHVMDRYVRNYRATKYVTKDNYLTKASIAIDTAPKEFINKCKLLTKRAKHRNLSKKESYLLKRNERDSKYWDAFIALRTNTKEGQGPIDWVKAGYRKCKEYYDNTFSKFVNQIMQSLNPLTMILGPFKSAFWECVSNLKDKCVGMINDHWLAFAAGSTLVLTLIFLFAMICICKVFVYLLSTLGIVGCTVTFLVTSLIVIFFLFNGFLEQAADIQLCELVGADFLNFLNQNQNIAPIAATMADIKEEALRGQGLQWCFTALYKLISRLIPGGAKEAAIMFNSVGNISRSASHAKDFFVNMKEMTTSWIDALSDALALLGDDSVTAMHTLKHLCENDFLEWAKRVERYAGDTYDSMILNPADRLRIIRELVDQQVGFQKAFFNPRIASKAPRLMLTEFQRLSTMLRDCHSALSRAALFDMQRVPPFWIHLYSENGGTGKSMAMMPLGNYLLDSIEEPKTHRFVTRNVASRFLNGYLHQPCFLMDEFGAAPKTDYMDEVTMLDLVSPNPLTLNMAALGDKNIMFTSKLIISTANRRLAHPDVKLGANLDGFLRRRHILAEVVLAQGKPYFHEFILLKARTEQKIYLDQALREVASPIHLSPAEFYAVCAEQFVNFLNQQGNALIEQQGVSYVRSDDFSFLKDYLQYKMGLDFQQCEIERIVTDYSLSIKNQTIFPAEHEHIFSRWRAELEALSLSELITMLDKHVTETFVYTLIKENHSNVVMSNLTPYECLIYSFCKDKYKKETDATFSSLPEEEVKQPWLAEFLSFTARLCLNVPKWVTLVLALCAFCLVGYVLIKFAIGLFTGACTIFSVLAFSSLSAQGPEDSPGFENARKTAGVKVHFVKTSFQPSDWKGINVKPSGFNWGDVADDDDAIPLWGQGPDQNQNVLNLLKHQVVLIAEHSKVVYNAIALGNRNFLFTKHVWDLMPTCNYGLFGYAIAKNKIYINPNVRPAIQLKNRDLVVVQLPDSVPPFSALPKDIFLSNLAEAPKVANAALVVSEPLYEKRSVAQLQQKIYPFENLPQIHSRDTYSCGSLGSKPMPACYSYTFDTFAGLCTSPLISMDGGRCVLLGLHVAGDKSKMGYAQIVTLEDFSDINFSEKVGQGPEQMYIPTARSESFGSVCLLGKWTGPKPYFLENSSLTPSLIHDCIDIDMTTEPAILSKKDPRLQYTNNKDFDPFLSGMGKYAVEAHSFDEDEELFEDALDRVFSEIPMFTCEDLSNDQVCNGIEDDDYAEGLVMQTAEGYPFCTMRPPGVTGKTWLFAGSPGDWHIVPNSLLANELNVKELNLSKNIFEPVIGIDFPKDEKVDSSKVYIKQKTRLFTILPVDYNILVRKYFLSFVSQLMALHNEVPTKVGIDPISNEWSILCHSLHSKGTNWFNGDYSRFDGITPRNVLQGIVKRISRRYANKSSFAITDPTLSINGDLARSLLMDMCSTRYGLTNGDLWYVTSGIPSGFPLTVIVNSLVNSFFVHFAYMKLHSSEVHKALYPLYSFRTLVSYAVYGDDNLISVHDTIKDTFNLVTISNLLLEHGVTLKNGADKNEEILSPFYPIEKVDFLKRRFTTLQGHIVAPLNTVNITERLHWVRKGLGDADATLENCKSALFEALFHGELYYNDLRGKIEKACKVKGLPLIVPDYQDALSLFLTGGSYAKAIQAIAMNLPDRISLYKSEFYSVQIYPQIFYVTNERNVTLQKLLETTTLRNICYVSRNYESRSSSRGLFTLKGEGWTPAALKARLSVYKAMAKPVYFVDEANDGLAMFYCLDYAFRVCGLTRSQIAKILNAVFGGNPEVCQRIFQFFSQVEPTNKYIPPNQRR

SEQ ID NO: 559 - protein, 2124 aa, Currant latent virus
MNSYNFVFGSFDPLTGIDAVSSFEEYYSSPAGPMTRFQARRIELACLARARAADAAAQAERVQADLRLCAASMRELQAPWMLFKAPATKSLPAKSVAGPKRESQESLFLRDYGRSLCSPLTSWEGSRVLQDMEHAVLAKDADPLSRALQARALRRAAFKARCRKRAFKAFMEECKFLSLPVQVVSSIPITEPLLPTPEAASLGTKCATSRRQSKCRRSFSSFLPKEDFSFVLGPGPVSDTEETGYSSGDSVSSLEKPSDSVSESSPRSCSHGITCRAQFCFGYLDFRNEINASRYLNWLLQTQLPGGITCFELPITYYLEHCTDTMEAIDLWWHVMDRHCANFKPSKHRTPFEFHAKNAERTIKAKNSVPSRQSLKQQMLLEKSQPNWEFLDSFYEGKRGEGPWQFVKDKVRCAVDGTYRAFTLFVNKILHSLNPLVIVLGPFKQTFFEVFNNLKENCYAMLQKHWLAAAVGASLVLGFLFLLAVICICKVFTFLVSQLGLPVVTLSFLVTGLFVLFFTVNGFLEQAADVQLCALVADDFIRFLSQNKSYGAVAGIVADLQEDAKKGQGITWCFQALYKLISRLVPSGAKETVALFNSIGSLSRSANHGKDFFINMKEMVVSWMDAFHDALALLGDDSVTAIHTLKYLCEEDFLDWAKKVERYAVDTYDSMVISPCERLKILRLLVDKQERLTKAFFHPRIARSAPRLMLNEFTRLSTLLRDAHNALSRASLFDQRRIPPFWVHLYSEKGGTGKSMATLPLGNYLLDVIEEPQSLRFVTRNVASKFLNGYLHQPCFVMDEFGAHPTQDYSDEVTMLDLVGPNPLTLNMAALGDKNIMFNSKLIISNGNRRLPHPEVKLGANLDGFLRRRHVLVEVVRVEDKPHFNEYILLQPRTQDKLYLDKAFRPCVDPVQLTPDEFYAVCAEQFMTHLNREGEVIQQHTGVYHVRSNDFDFLRDYLMCKLNLGLDVDEVERIVTSYAHSTKGETIFPIEHEHIFEAWKAELESLTLSELISMLDKKVTETFVYTLIKNDSSNVLISDLTPYECLIYQFCKLKYKSETDAQFPSFEAKEEKLPWYIEFISFCAKLVSQLPKWLILCVALCAVLLVGYTLIKFALYMFSGALTLLGVLSFSNLSGQGPEDSPGFDNARKTQGIRVKWEDRPAYGKAYIPPDQDTFASQEEFNKYWTSGLPSRWSDYEGQGPSELDQSVINLLKHQVVFINDMTKVVYNAIALGGRNFLITKHVFDLMPVANYSLYGYAITKPKIWIDNRVRPKIQLKDRDLVIVEMPLTVPCFSSLPKDIFLKNMQEAPKQVNAVLVIAEPNYEGKSVAKLVQKFQPFTNLPQVHAKDTYSCGSLGSLRMPPCYSYTFDTYPGLCTSPLICMSGGRCILLGLHVVGNMSKTGFSQIVTLDDFSEVPLQSGTLVGEGPECYCIPTASSECYGSVTKLGKWTGPAPYFLEKTSLVPSMISKDIDIEMTTEPAILTTKDPRLAHSNDPDFNPFKAGMLKYAVEAHGFNEDEEFFEDALDRVFSEIPDFNCQELADDEVCNGIEDDPYAEPLVMQTSEGYPFCTQRPAGATGKSWLFCGSPGDWHILPGSLLHNEMNKMERNLSQGIFEPVIGIDFPKDEKVDKSKVYIKPKTRLFTILPVHYNILVRKYFLSFVSQLMALHNETPTKVGINPLSNEWGILQFALSAKGENWFNGDYSRFDGITPRSVLLGIVKRISNRFVNKNSLAITDKTLSINGDLARSLLMDMASTRYGLTQGDLWYVNSGIPSGFPLTVIVNSLVNSFFIHYAYMSICKKSNDMDLYPLYSFKQLVSYAVYGDDNIVSVNDLIKDKFNLVILADFLKDYGVTLKNGADKDEEILSPFYPISKVDFLKRKFTVLQGHVVSPLNRINITERLHWVRKGMTEVDAIVENCQSAAFEAVFHGEHYYKDICGVIKKACTKNGITVDLPTFQDALNIHLSGGSFATAIQTMSLQLPKRINFLHKSYQCVNVFPDVYFVTNERNETVRRLLERTTIQNICYITRNYASKNNSQSFFTLSGEGWKMCSWEARYKVYSAMKRPVYFVDEANDGLAIAYALDYSYRIGDLAFSDLSKMAVALCGHRQTMCSNILDNFSALSTI

SEQ ID NO: 560 - protein, 1850 aa, Arabidopsis latent virus 1
MATITLFTGNAPHSLIAYITSKDVVHMLKCYVQVDNFPSEFQISNRLRRLRESHFDLISLGYSAFVLHRNHLAQEPYEVYSGDFIFNDYHQFLCETVTNKNALETLRKYIRTAFLAYFDEIIEFNESSYLLDDDDIDMQGTREMLASISNWISATCSSAVDWTVNEIMKSFKAHFNGVVERYCPIGVQVCGWITNVWDKVTAWIDEILESINWFLKGTKELIVWGVCILASSCAIGVLEKALIGLGFISGGLDLVKTFLTGSVLTGSFMYLKGFKNEEQVTFTAMVSLMAGIVSTVITAAFGCPTVVVAQAGPNELLEMAANGLNDFCNTTLVSMGKTCQAVNQITTCATNLKSLAGKIFSCLQNFIWQMFGMESRFLRDASLMFEEDLDQWLKDITKAQDTFLAKAYATQDDMMQMQVLVRKGQKMRQKVLNANTKLSPVLSSTIVKGVDTIEKLLRDATFQGVKATRKLPFVVYAHGRSRVGKTLVVNRLISDFQTHFGLPSDTIYARNPVDSYWSGYRRQPFVLIDDFGAVECDPSMEAQLIPLVSSAPYPLTMASIEEKGLLFDSKFIFCSSNRLEPSPESKVHDDEAFRNRRHVLIDVSLNPDIPYDPSDVTKNQIYTILKYDLTQYIRVAEFADYGDLLAYCLTAWEKHDMEQTLNLEKDYQEPKLDTDFEKFEHLLTMAVTYNTPLTELQSLMKMREDEESQYVHFVSFRREGKLWHYALNGKMQVCEWKQEVTPDEELVLELKSEKLLLQSYKVLRYSESTNLVIKTHLDVLAREDSYDEKMNFIGMVGNPNYHAQIKPIIDKMPSWQRLIMCGMGAMLARKKETTWYSAMVEGMKDTMYTMYSKEIEQWPIALKVVVGVVLASVAGAGFWKLYDVLKNAGNGGAFAGAAALEFAVGQSRKPNRYDVAQYKYRNVPITRRAWAQGSMPIEHATAAIMTKIKASLQYGRTEVQIVLLPGRRFLGYSHFFRELKGSLMVQIHTANKTYWHTYKAQNMEYFDNSELCLYTDGSLEDIPSSCWDLFCWDFESKQMDSFPAEFLSCKPAVGTGAPQPQWAPIEVKLRTKSLEIRDGDYVRRVPIYLEYAAPTVNFDCGSLVVARVGTTYQVVGIHVAGHNNSLGFAALLPPVAPVAQAQCAQKYFEFYAHEEEVRNGIAMVGELKNGVWIPLPTKTSLQETPEVWHLETPCDKYPSILSNDDERLKISGCTDYDPFSSGVLKYAEPMGLLETELLDEVSNEIVETWFDCVEEGEEFEEVSMAEALNGIEGVSYMERIPLSTSEGFPHILSRKNGEKGKGRFVEGDGMEMYLIPNTSVTKALEELEADLENHVPTLVGIECPKDEKLPYRKVFQKPKTRCFTILPMEYNLLVRRKFLRFVRFIMRRRDKLACQVGINPYSMEWSELASRLQAKGDNILCCDYSSFDGLLSKQVMRSIAGMINRLCGGTERLRKERENLLMACCSRLAICKKQVWKVECGIPSGFPLTVICNSIFNEILVRYSYKAILREQKIPKMISLSFDDYVSLVTYGDDNLISVHGCVRPYFDGTKLKQFLGKLNVVITDGKDKTSEHLLFRKLTECDFLKRGFLQRSSVVWDAPEEKASLWAQLHYVNTNNLELHEAYKVNLVSVLRELYMWDPVECASFRRKALRTISWLSKEDVPTLEQIKEFYSIQRQQKLPDSADSMDLLTQKENLGPILAPTGKQHGFEFTEYVRTVNLSEHSFEEATSEELWLLCNTMYPQNRLPENVISVNWQQGVGRGGLPTQHWMEANVLRRNSNLRRVVDSALRGGKRLVIATREAILPCNVLAILFMVHAGTIPRETSNSTLTQIIEQVKTLGFLPKEIPAAF

SEQ ID NO: 561 - protein, 2280 aa, Artichoke Italian latent virus
MRSFVTVSPDGDSFSFNFCKYNNSLNKFLLSSSNLDVVLDDFDFYFSFFVKKYIILENFWHNRCLSALTTPAGVVVNTPLYVAFAELALDKLRINPFHQLWEETLANWPCCPGTSLLDFCRTQYEIRREAAEASAEILRLKEVQRQEAFDAEVKFLEKNGVLPAYSREFARKIWSAGKDQKKARSALLVKVKKGKQLKREWEEACFRARVRAELAREFEPSPHQIQRAIEAQAFADKLGRKYATLTARVRAKRAAARALREKAIYLEVQDLLNAPLLPPMEKVEMIRKHRKVRPTGSNVVHTPKRNALEDLCPYQGLGAKSADVRCQATLMAGKIHATYPRLATAIYSWVLGPSMRFECVAPIKSFIKGLTFMVDFFPEEVLISELNKIETEAQCFEASLVVEEERAKLEAHAENANCRANVFMRAMAGVKNMARCAYSGFLSGCEEAGRSLSEGICSVMVDSFRKCVEMVSKELGTAIELIETMIRKVKKWFNDLLEKLHEGLATLGKYAMYALAILLGCGLTTLLENCIGGRGILTSLFVSGVFAAIGLQCAGGWDNLQREMVQMCTALAVAVFDCQNTGRRNAQGQPIVSPIMDIHNAHHLEDRRTRRMTDEQGNLRSIPVISGIINAMSQFGTGLCSMQSASLIEIGKIGAACHSMRMGKEALKEFCSTIMYYLGRVADKVTGRETVFFDELSSLVKVNVRSWILQAQSCVRESFHTEIGNAYFRDMVAKLVEEGQSIQMGVNGLPRKISADYGQLVGQIMKDLLELHKRTIRAGISEGRRPEPVWIYLFGQRHCGKSNFMSTLDNELSKYFGLPNTTAHRNGKDQFFSGYNGQTFLHIDDLSCVKLDPPLEAELINLVSCQDVPLNMADLADKPIYFRSPFIITSSNFEDLPAATGVRDVEAYRARKACLIEMRRKPGVVYDPDNALAASQARFKDPMSQMLMPGMDEETSWMEMSDVITEVLNISARHRAAQDKLQARFLREKAMSDPLALASEKFLQGDVKNCYLDFSGIELEKAGIPRPQGGRGLYVDGKVYLLDDLCQLEELEIAEEGYKRLWEERMRLKFLPRVQAKQILNTSSMVVTGFLRSLVNGDCAVLSVDSLSTGATVGQKSIFHGLRADERIYLRVLQHQLDLYSMEIPENPYSNSAWLKILRAIGAGRDFLVNHGCGILMVAAALCLILVAGFGFWKLFVGLFSGSMSLGSAIVGFSAVDIKAQHKSSSQEGGYRARNIPIHHRYAYAKSQAGDGLLPAARLCVAIYQPGGGFVSAMQYKNKSVRMTRHQALRFKEGEQLSVIFASTGESKLINWHKYHMREEPNSEIVTWLAPSLPALSPDLKDLFLEDKEVELPNHFKTIGYVLRVDSTAFHYDMLDTYAAVDKTPLPLKGVLGSELYLHEIPEKLTFHYESRNDDCGMILTAQIRGKMRVVGMLVAGKEKTSWADIMPPNSLAELKSQIEYIPEFGEACDGHFKVGYVGKADAPTLPKKTNMVPVPAHLRVPCEVPIKEPAVLTKEDPRCPAGVNPPIAALKKKFTQPMAELEQEILDEVATDILETWYDCEDHVLSDIPLEVAINGIPADSEEAELENFVMKTSPGYPYFKNNRAEKLKGKSAYFEEAEDGTLKLKEGGMAAELHENLVEFTKNEVPELVVIECTKDELLPERKIKVGACRLFEIMPLHYNLFLRQKTCAFTQFLQHNRHKLPCQVGTNPYSREWGHMLNRLMRVKTNEAINCDYSGFDGLLNAQVIECIAKMINRLYALSGESEVQQAQRYNMLMALVGRYAFVGQKVYKVNCGLPSGFALTVVVNSVFNEILIRYAYKKLAPTPERNRFNSTVCLLVYGDDNLISVSPSIASWFTGEAIRITLKEKNVKITDGSDKDAPTIEAKSFWELDFLKRKFLKLDNGIVQAPLDRSAIFSSLYWLTPDKSKFHESQKASDYQGEVDVVEELILNVNVALMELYLHNDPAEFQRVRGFYVKTLPLLVSQLRTWSFCEAFHSQQQTGMLKYDPAVILDHMSGADFKKFMHVSEQGNKAHFYTDILGVSGPHYKPQENDFVVSTLPLKMGVAGEHVPVQFGTGIGGLPTKKWVGDFGRPSRLKNAKGYLIYNLLREQVEAGKRLIFMGPAPYVANNAALISFGTAAKMLVQKDALVYYRNVIPEATSGLEQYFDAPLPTATVGTFYFANGETYAALCEFKDGKVLNYEGLPTQCLNQAVKERKLPCMAAGQVRNKFIVSLVCDNTMCPHHRSTRQSYEEAFRECWTSKCKTSACVVSKWYGTKLS

SEQ ID NO: 562 - protein, 2172 aa, Blueberry latent spherical virus
MEYLSRSQLKPRGGKVPCGVVPRAVLEASRLAKTILAKPANFSLTFLAQGASLKPRSVALACANGVIATGPGFCIYTPEGIPLSWGDAARRVKPFCRALAKSESGLYQKMTEELAFRKFQRQVPHMVAASKRLSARKQASRAKGAATVAARSAAATAELEARRAAGATKKSALRRALKKKATKKVVSASAAMQRGEPTLGSIFPFSSSLFERVSVRPLGVPFNPPQREDFLSSSSPIPACPGMGIASLPLMGRILSLAPQVEQLCELCAPGAGSSFSSAVADLASSSTLHERDVFFRAMVAISQLFSAFPNAYILGNFVGFHFYNCEAILNLVEQANSMALYYICLFKQGPIVHSFLDSFSDVASHISGAARIVGNVVKNFSSSIFDSILNKCESIFFKILSPYMATLHSSKVEIVNFWKKCKDWATNLWANAHLALQGLGMYAIWALVLMILCGIVYLLETMFITAGAISSHGLLVSGFLCLVMAACGYTVFAVGKESAQMIRVMRECILMAVIPDDVVKDIAAIPAPGEQQVHSLLDAAMVPIKFLDSLASGLSLFSTSSVTVLGKLGNSLEGIRKGYNCLADFISIFLNYTGVCWEAVSGKKTSFFRDLATTVKINVANWTEDARRLIEYHEMAGLLDKFEYEKVRTLIYQGEEMVDIANKGRSSHTSTSFLRTVGSLLNDLRDVRAKCARSLRFDGWRRQPFWVYIFGASQCGKSTLANYLAPLLLTHMGWDAHDVYSKDPTESYWSGYYQQKCLKMNDLSAVIPRNNVPLEQQLIPLISTEEKMVSAAECEGKGIQFLSEIAISSSNVEDAPTAAELIDGNAYRLRRKVFLRCRRAAVWVHDDKGNRTEAIDAEGQIINRDYNPSDALDCVEVQWLHSSTGLPLPGPPGQWHMATSTIPLIKDAMDAHFLQEDIKRDAWVQQTDMKSKTGREVSSYLSGLMGALGSYKAIQRSSETSEAGERKFLVAVDGQIYSLDSQGVATLEANDAYDNVEALEAVSLNQYRLDFSKQVREHCLLTCNSSFHSSLVRDILEDMLVNDACIISVNKISRDTKQIHRDLWKELKLSERVFLRISQKALNTLREQPHFKVDLKSQILDSFAVFRDSIVDNRQKILLFLSAILLVGTLSWSFLSLMKAFLSGSVGFGGALALKNQLDVHSCAASTASVATSVYSSNSIPIVWAQAARYANVHSCLEENHNFKYFEDGLAHLLVRLVGSSGISENAILYGPRSIALCAHQIRLFPDHDRVQIHYLDRNHIPKCFNFTWHYGNALEQDDTEVCIYRDDQLTPLPVYSRNLYIPGGEKLASAVNINGVCIKKRKFFHADSLTQAERQLDGETPIIRSWSNVGALCTSKQTISNPKPGVAYSRTLNRYLNSTYASGVHDSGGLITTIKDGVRKVVGLHVAGTQEGHLFKSTVAFLPTGSFADIHSGEDFFVPESGIETAGYVKIGYIKNPALRPHVSTTSQIGRVTPNLCIPLPTYNIDDDEHFVDADEVFEIKENAILSKKDERLKDLISNPEAFNPLQDGMVKFANPMLPLDEEILEKVCDDMFDTWYDMLPQTDMGAPQFLQKVDLDIALNGIPDDACMEAMKLDTSEGYPHCVERAPGESGKRRFVEVDDTFHVSLKEGTKVYENYHNLSNTISKNIPVLNCVECLKDECLKKRKVATPRLFDVLPFEHNILLREYFLSFSAFLQHCRIQLPCCIGVNVYSREWTTLYDRLREYSDTGLNCDYSKFDGYISHQIYGWLAATINRLYRDGVEANAARNNLLLMFIGRRSICGGQVYMVNGGMPSGCAFTAMINSLFNEILIRYVFRKCTPAPMKNFFNSYVRLMVYGDDNLISIKEEAIPYFDGPIIKNELAQVGVIITDGTDKTSPTLQRKPLESLDFLKRGFRRLSTGIVIAPLDKTSLYTRLYYSTAGDDGYCNLDVLRANVKSFLEEIVLHPNHVNEFFRVRSFFLKKIPAWADFLPTYAAAQDFHYRQQQTQSPYLVPRILETRPMGTEYKMMAGQDNHDNIVWLTSRVAICGPKYPVPSGPLHFVVALSSFVRTCERGVNYKVDIAEGSGQLPTQSWTDSFSSSKKRTALHTAYGDGATIYFRSVMPYYSSWCAAGRFLKSQGISTSSVIALFEQYKPANAGNIAPLLATKEYRRYSHRPIFDLSSIKQHLAAS

SEQ ID NO: 563 - protein, 2095 aa, Grapevine Bulgarian latent virus
MATFKMGSVVLTPCFLAKERELVHQLLRSSSSFAVTFLAQGASLKPIMVARAIINGVIAIDTENFGFVDQTWSEAARVVRRYSLAHSKYCRKVRERSARRFAERKAARKAAGVKAACKRILASLDADLPCSGRLMWAIKRAHREDFASRMKTAEICRMIRASKREERAYRAQYAALEVRRPVSMRVPYVCPLVANREEVAGEPLRGRAFERTPRSTSFSASPLPRMRSPYEAEIAPLFGACDRASRLELHPDIKFFFREAPNHASSLGDVESLARLARCTIAYFKLFPCALYFEPLRRLKPQSTTDEIDKCANGLEMELDRLREISVSDLHANGLGTFIAGIAAGAATATGAVVGTTVAGGKYLIDHAAAAFDKSCNKVVETVELATRKFGETMLDMVRKTFDSCLGPYLATVSHAREQIETYWRRVTQWIKTMWSKLSIEVQALFDSTWWALGLILCAGVVVLAEHMLVALGVLTHAGALTSLFITAFVGYLGWNFAAPATEAEGTLLTTLRALVHIVVEKPMSVFRSDQTANAPNVLEFPLRVLETLGNGLVSAPLGHSNMLGNMELLWINPQGKDAMKDLLMCFDCIADSWDYMTGRKDSFFREIASMTKVDIVPWIKSAQQIVLEAQTVAVTDPVLMDTITHLLYKGHILQRTLAGAKRATSLDYGRVVSSLVQELTKIRAQCARAGIFEGRRCEPFWTYIYGPSHCGKSLFMEEVTRRLLKENGHALNDIYAKNARDPYWSGYLRQAAVQIDDLSACVTEPSVESEFLQTIGSKDYKLNMAAVEDKGMSFNSSLFITTSNVFTAPTDARILDKNAYNNRRGAVVQCRRAPGVDFDARNPSGSCEARLVDPNDETPKSEWANCSKVLEEVVHLNNAHRLKELMLMANYRERNDTLHPVHSGARNFLRSCTKSLALGNLVCDGVIYVIDRETATCEATKEKPTSGYEQTAQHFVASLRQEISNRACDGMLNTFLNGLIEGPCEVKSVDALNEAATSSQKEFFLELPLLERVYLRILQRQLSAIREMPDFAFNMNVRERILASLRVGYNTVCEHGGKLLTIVAALVLILVIYSSFFCIYRTSIAGPTDGVAALVAVGALTANAGSVSSVYSSSDGGLSKFSRNTPINYRSAASSDFRANSGGDDEFLMSLLLWLETPGGGLISCIRGKGRYIYLTAHQAEQIPDGARVFARTRSANGVVHTVQLLWDAKQVRRYSDTEAVTYHDARFTALPEPIKSAFECDIDQLPTLFDMNVVLVKRKSAMRQVDPTLAALPAEQPIIDCWKSNGKLNREMVGFNTYAYGGSYRNEIPVSIVSKCKTYAEDCGAILTTMWKGKRRVIGMHVASGYKNGTQNPKDWTSTATLLPGIADLECNSGLNMVEESGVSYEGYRKIGYLPRMADRPYQSGKTMFVPVPEEMMYIPTNLSERFSDGTERKVEVEIKQPAILSASDPRIPEGVSYDPLKNGMEKFKKPMDLLDDALCAEIANDIAESWHDCFDSLEDCSDEVAINGAEDEFFDKFNMTTSEGYPWVKQRGIGESGKLRYFEETVNGQLALRKDTPVYKAYHDLQELSKVEVPELICIETPKDECLPLRKITLKPKTRLFSILPLEMNLLLRKKFLSFAANLQQNRDKLPTQVGVDPYSREWGHIYSRLRSKNSVAVNCDYASFDGLITAQILKHIGIAINSVYVGSPESKRQRANLLMAIVNRKSICGSQVYEVAAGIPSGCALTVLLNSIFNEMLIRYVWKISVGGVPREMFSTYVTLIVYGDDNLISVHPEFLPHFNGMVIQAKLKEVGVTITDGSDKTAEGIYEKPFEKLDFLKRRFAKQSDGTVLAPLDLASIFTSLQNVTLGAGSIPEAVRINVHVALTELYLHQKREWYDDLRNHYQKTQGWENLPTWAQSHAFHREHLTGALPWAPHRVMDIPVDKKKLTQAMQSQGGLDFVVQVAERIFVCGPAFRPDATEQGSFVVSHTGSLPRGLQGCLSPVDFVSEGQGRLPTQLWVNKFRSERHHLTCLIRDAYNRGCNVYFRAEQPYIVNWLSATSFAMGLGKDYRAILHLYHNVCTPNAQCLDPYFEARRFQRVDAYVAPPFHHRR

SEQ ID NO: 564 - protein, 2227 aa, Strawberry latent ringspot virus
MGYSRGSRGGADKPKLCGICFASFPDAQERKCHYRKYNCRDSGGQLGGLVSTGRCASAKERNLKVEADRKELESSCDDFLTEQDMEMTFMSDLFEFTEGFSGDPITLCFAHHITYGPGDSYISRPIYQAPGLDVADYAAFQNEKVKGTQREFLTTDRKYDAEVLTSVVRTAIVGGGFGSPTFDYTGLGGDGLKYRFDSDDLWSDHSKGLGRFVSAGFTESTKGSLDLKLTLQDVDEMTQALSDEWAEWVYFEEDLEEYLEEYLNSKIALAQEIRALKQKRTVALAQKAYDQAKEKPAVERPISPDTVLQSANSYLSGTKWCYDSEDEDYLPVAPLDKFHNKKHDIDFVDCCDTEYQIQPSGTIYTETWFIDGCLPGCWFKRGVAIDEAVVCEKLPLIGKTPLELMIQYQVEPTGDLLLDIQRALFAYYEKEALPNKKYFNLNGVPTMIVLEDWRCDLRYCLYAPFIQGDQLKHLMVVLNAPLPGWLVDFPKRRKSGVLQASGWNPLRYFSKQATLGFLDGVMTKLKELIGPIINAASFVWDLIIKAKDWAFKALEDMIEKRGEILKALLQPLLYVCGLLLFLGSLKGLKTIVESFGIPLAILTGAAIGLGVYVLVTFLGQAHMGALKRSTKIWDLVQNWDKPSEVKCIDEQIIEVLVEESPDKEEWVRELLASPHYVPECVIDLTHMKDLLSPQKCANFKQAFEVGASEASSPGMLFGSGFIWKILLLLCPLSMFGVSKTLSCAKDLITIQGGQDAAGRFFQDIVGGTQEVFYTITGEKSEFLDYIYATVGVDFQAWRAEVLELTTATPTSIFLGPQERLKRLRACKDKADRLILQMDSRKVPGAYITHFNSLLQSLDRALVECQQALSVGKWRKTPACIWLYGDSHVGKSVCSQYLIDDVLDSLDYAQTGRVFSRNGSDSFWSCYKNQSAVLYDDFGAVSEGGHFDEAEIIRLIAPAPLPLNMPNLEAKGNTCCTSDFVFITANQAGLTPSAVIHCKKAFENRRLILAEVTAVEGGRYRDRYRFTIHQKNEPYARDDRFQVMNYDQFMQYVVNQSKDHFSEQVDLRDAPHTQIFAAADQIAAEAEEGFKTAGITIPFCMLKCIEGRMVTYYDEEKFTEMTVELSETDADIIHSRLDPQMITQRLQMLLPKAAYVNLKNHFGLGTDPFEQPNPYFNCSQRAKVIGRFLKPKVTEAQLETSKRGFLQVTKELAQGACRAISDAPFLVKLLLGFGALYFVGLPILGWLKSLYSAPSLMTFAALGTMRASGSLSSSQDQETRRTASGRERRRYLLEASGPGALEAKPQDVETELASLSKHLVGFTSIDFPDHHYRGIALGGTRVLMVYHVWLELHSGCYKVGSLSKTFPFTVNRKNCKFQRIGLKDLVIVDFPPTFVSFPVLKLEKWLLASHDPFMAGSGWFMEMVFQRNGVLEVAREEADYTLLDTHDVYDAAFLKGVGLNKCVRYTICDDAGTGYRNDFFYVSQCGTPLVANYGKGKGLKIASIHVVHHFSATEKDTIIAGSGSLLTKEEYLEASLLLGDIKHPLETDRIQASGCLSGDEFFDAETVFPEGLLLPSQAPRQATSSEIHKSSISDGLEKLVGEKRKTEPAIISNRDTRLKDRNLDIFKKGMMKYKAVAADMSPVTDEEEKIWNVTWDSIFDLPGGIQSKCHLLSEDENLNGVNGDNEYRGMVVSTSEGWPEVLNRKNGEAGKERFLLGLPGCYTLNRNLPMYQRILDLDALSATTIPCIVGLDTAKDERLPLSKIYQDVKTRLFTILPMEYNYLVRKYFGSFVAELMKLHNCIPTKVGINPLGYDWTILGKKMHAKGTNWFNGDYSRFDGVTPRCLLIEISNRITKLYGDEHRERRLHLMLAATTRLGVAGIGLYRVSGGIPPGFALTVIVNSLVNHFLVRWSWEHMMASSSLFFTDCVELAVVGDDNLVSVKQVAAEDFNLKKLSAFLAGFGFTLKDGSDKNKEILPEFNPPEKCDFLKRCFKARGDRYLAPLSWLSLSESLHWVRETNMTNAAATQNNVEGFLRELFHYGDKELYCKWRRDLISLCAENRVPHPTSYSFEELERSWLSGKTVASIFEKEEPEIVVLKDAASDVAPNVHIVPAQTCLKWKPNEVPTVVWCGPNCPNQLRNANGCFLIQAPQGSRYPLRSTVRNSLKRVHQRSDEVYFAGALDQSLVHWVAAFYASMYRESFSHSKYMAAYFGDNDKGLLEAVTAAKGW

SEQ ID NO: 565 - DNA, 6240 bp, Apple latent spherical virus
  source 1..6240: mol_type = other DNA
atggatgaggggtcttgttgcccccgctcccaaatccaaacgcgctctcaacgcgaggcgcgccgtaaggcgtgggaagcctctgaggaggctgcctgggttcgtgactacggtcgtgaacccacttcccctctctctgtttgggagggcactcctgagctccttgctatggagcatgcttaccttgccaagcaaggtgataagcgcatctgcgctcatttgcgcagacaggctctgcgggctgcctacaaagcccgatgtcaaaagagggcctttaaggtcttccaggaagaatgtgaattcttccgtctccctgtccacattgtggacaaaatccaaatcccagggcaggctagccccgtgccagagagcgtatctctgggtggcggtgttaaaaccgctacttctaagcgccaagtgaaaactcggcgctctttctcttctttcctcccaaaggaggaattttcctttgtgttgggcccttgcccaacatcttcccctgaggttactccaacctcaaccccttcaaccacccccccttcttctccacgggcatcttcgcccagaacccccttgcctcaggttaaagaggtgaccacacagggtattactctgtgttctcatgggcctgcttgtcaggaacatttttgttttggttttctagatctcaaagatgagtttcatgcttccacttatttaaagtggatgcttggaacccaactacctgggtctattttttgttttgacctccaagtttctagttatctagagcactgtacagatacaatggaggctattgatctgtggtggcatgttatggatcgttatgtgcgtaattacagagctaccaaatatgtcactaaagacaattacttaacaaaggctagcattgctattgatactgctcctaaagagtttatcaataagtgtaaattgttgaccaagcgtgcgaagcatcgaaatttgtcaaagaaagaatcttatcttcttaaaagaaatgaaagagattctaaatattgggatgcttttatagccttacgtactaatactaaagaaggtcaaggacctatagattgggtgaaggctggttatcgtaaatgtaaagaatactatgataacaccttctccaaatttgtaaatcaaattatgcaatcccttaatcctctaactatgatcctaggaccgtttaagtctgctttttgggaatgcgtttcaaatctcaaagataaatgtgttggtatgataaacgatcattggcttgcttttgcagcaggttcaacacttgttttgaccctcatatttctttttgcgatgatttgcatttgtaaagtttttgtatatttactatctactctaggtatagttgggtgtacagttacttttcttgtaacttctttaatagttattttctttttatttaatggttttctcgaacaagctgcagatattcaactttgtgagcttgttggagctgattttttaaattttttgaaccaaaatcaaaacatcgctcctattgctgccacaatggctgatattaaagaggaagctctcagagggcaagggttgcaatggtgttttacagctttgtataaattaatttctagattaattcctggtggagctaaggaagctgccatcatgtttaatagcgtaggtaatatcagtcgaagcgcaagtcatgccaaggatttctttgtaaatatgaaggaaatgactacttcttggattgacgccctctctgatgccctggctcttctaggagatgactctgtgactgctatgcacacattaaagcatctctgtgagaatgatttcttggaatgggctaagagagttgagcgctatgcaggtgatacatatgattctatgattttgaatcctgcagatcgacttaggataattagggaattagttgaccaacaagtgggctttcaaaaagccttctttaaccccagaatagcttcaaaggcacctagattgatgctcactgaatttcagcgcttatcaactatgttgagagattgccacagtgcactttctcgagctgccctctttgatatgcaaagagttcctcccttttggatacatttgtattcagagaatggcggcacaggaaagtccatggcaatgatgcctttgggtaattatttgttagattctattgaggaacctaagacccatagattcgttactaggaatgtagcctctcgatttttgaatggctaccttcaccaaccttgtttcctcatggacgagtttggtgcagctcctaagacggactatatggacgaagtcactatgttggatctcgtttctcctaaccctttaacgttgaacatggcagctcttggtgacaagaatatcatgttcacttcaaaattaattatttcaactgctaatcgtaggctagctcaccctgatgtaaaacttggggctaatttagatggctttctcagaagacgccacattttggctgaggtggtgttggctcaagggaagccatattttcatgaatttattcttttgaaagcgcgaactgagcagaaaatttatttggatcaagcattgcgagaagttgcaagccccatccatttaagtcctgctgaattttatgcagtttgcgctgagcaatttgtaaattttttaaatcaacaagggaatgctctcattgaacagcagggagtttcctatgttagatctgacgatttttcttttctcaaggattatttgcagtataagatgggtcttgattttcaacaatgtgaaatagagagaatagttactgattattctctctctattaaaaatcaaactatctttccagctgagcatgaacatattttctccagatggagggctgaattagaagcattatccttgtctgaactaattaccatgctcgataagcatgttaccgaaacttttgtatatactctaattaaagagaatcactcaaatgtggttatgtctaacctaacaccttacgagtgcttaatttattctttttgtaaagataagtataagaaagaaactgatgcaaccttctcttctcttcctgaagaggaagttaagcagccttggcttgcagaatttctttcatttacggcaaggctatgtctcaatgtgcccaaatgggtcacattggtcctagccttgtgtgctttttgccttgtaggttatgtactaattaaatttgctataggtttgtttacaggtgcttgtacaatttttagtgttttagctttttcctctttgtctgctcagggtcctgaggattctcctggattcgaaaacgctaggaaaactgctggggttaaggtgcatttcgttaaaacatccttccaaccttctgactggaaggggattaacgttaagccctctggatttaattggggggacgttgctgatgacgatgatgctatccctttgtggggtcaagggcctgatcagaatcaaaacgttctcaatcttttgaaacaccaagttgttttaatagcagagcattccaaggttgtatataatgctatagcccttggaaatagaaattttttgtttactaaacacgtttgggatctcatgccaacctgtaattatggtttattcgggtatgcgattgctaaaaataaaatatacattaatcctaatgttagaccagccattcaattaaaaaatagagatttggttgttgtacagttgcctgattctgttcctcccttctcagccttacctaaggatatttttctaagtaacttagctgaagcacctaaggttgctaacgctgctcttgttgtatcagagccattgtacgagaaacgttcagtggctcaactacaacaaaagatttacccttttgagaacctaccccaaattcatagtagagacacttactcttgtgggtctttgggctcaaagcctatgcctgcctgttattcttatacttttgatacttttgcgggcttatgcacttcacctcttatttctatggatggcggcaggtgcgttttactaggtttacatgtagctggagataaaagtaagatggggtatgcacagatagttaccctggaagacttctccgatattaacttttctgagaaggttggacaaggacccgagcaaatgtatataccaactgctcgatctgaatcctttggatcagtctgtcttcttgggaaatggactggccctaagccttattttttagagaatagttctttaactccctctctaattcatgactgtatagatatagacatgacaacggagcctgctattctttctaagaaagatcccagacttcaatacactaacaataaagattttgatccttttctctcaggtatgggaaagtatgctgttgaggctcactcctttgatgaagatgaagaattgtttgaggatgctctagatcgagttttctcagagatacctatgtttacctgtgaagatttatctaatgatcaggtatgcaatggtatagaggacgatgattatgctgaaggattggttatgcagactgctgaaggttaccccttctgcactatgcggcccccaggagtcacaggaaagacgtggctttttgcgggatcaccaggtgattggcacatagtccccaattctcttcttgctaacgaacttaatgtcaaagagttgaaccttagcaagaatatttttgaaccagtgataggtatagattttcccaaggatgagaaagttgattcttctaaagtgtacataaaacaaaaaactcgactttttactatcctacctgttgattataatattttagttaggaaatattttctttcttttgtttcacaacttatggccctccataatgaagttcctacaaaggtaggtattgatccaatttctaatgaatggtctattctttgtcattctcttcactcaaaaggaaccaattggttcaacggagattattccagatttgatggaataacacctcgtaatgtgcttcagggcattgtgaagagaatttcgcgtagatatgctaacaagagttcttttgctataacagatcctacactttctatcaatggtgatcttgctagatcccttttgatggatatgtgtagcactcgatatgggctaactaatggggacctttggtatgtcacttctggtataccttcaggatttcccttaaccgttatagttaattctttagttaattctttctttgtgcactttgcttatatgaagcttcattcttctgaagtgcacaaggctttgtatcctctttattcttttagaacccttgtatcatatgctgtttatggggatgataatctaatttctgtacatgacacaattaaagatacttttaatttagttactatatctaacttattgttggagcatggtgtgactcttaagaatggagccgataaaaatgaggaaattttatctccattctatcctatagagaaggtggattttctcaagagacgattcaccactttacaaggacatattgttgctccacttaacactgttaatataactgagcgcttgcactgggttcgtaagggcctaggtgatgctgatgccacacttgagaactgtaaatcagctctctttgaagctttatttcatggagagctgtattacaatgatcttcgaggcaaaattgaaaaagcttgtaaagtgaagggccttcctttgatagtcccagattaccaagacgctctttctttatttttaactggaggctcatatgctaaggctattcaggctatagcgatgaatctccctgatagaatctctctgtacaaatctgaattctatagtgtacaaatatatcctcaaattttttatgtgaccaatgagagaaatgtcacacttcagaaattgctggagaccactactctccgtaacatttgttatgtttctaggaactacgagtctaggagcagttctaggggtcttttcactcttaagggtgaaggttggactccagctgctttgaaagctcgtcttagtgtgtacaaagctatggccaaacctgtttacttcgtagatgaggctaatgatggtttggctatgttttattgcttagattatgcttttcgtgtttgtggtttaacccggagtcaaattgcaaaaattcttaatgcagtttttggtggtaaccccgaagtctgccaaagaattttccaatttttctctcaagtcgagccaaccaataagtacattcctcccaatcaaaggaggtaa

SEQ ID NO: 566 - DNA, 6375 bp, Currant latent virus
  source 1..6375: mol_type = other DNA
atgaattcttacaactttgtttttggcagctttgatcctctaaccgggattgatgctgtctcttcttttgaggagtattactcctctcctgcgggtcctatgacccgctttcaagctcgtagaatcgagcttgcttgcttggctcgagcccgagctgctgatgctgccgctcaagctgagcgtgttcaggcggatctccgcctctgtgctgcatccatgagggagctacaagctccctggatgctttttaaggctcctgccaccaaaagcctgccagccaaatctgtggctggtcctaagagggaatctcaggaatccctctttcttagagactacggacgtagtctctgttcccctctcacgtcatgggagggctcacgcgtgctccaggatatggagcacgctgttctcgcgaaggatgctgatcctttgtctcgcgcgcttcaggcgcgcgctttaagaagggctgcctttaaggctcgttgtagaaaacgagcttttaaggcttttatggaggaatgcaagttcctctcccttcctgttcaggtggtatcttcgataccaattactgagcccctgttgcccacaccagaggcagcctctcttggcactaagtgtgccacctccaggcggcagagtaaatgccgtcgatctttttcctctttcttacctaaagaggatttttcttttgtcttaggtcctggaccagtttccgacactgaggaaactggttactcctcgggagattctgtgtcttccctggaaaagccttcggattcagtaagtgagtcctcccctcgttcctgctctcacggcatcacatgccgagctcagttttgtttcggatacttagatttccggaatgaaatcaatgcaagtcgttatttgaactggttgttgcaaacacaactaccaggaggtattacatgttttgaattacccattacatattaccttgaacattgtactgatacaatggaagctatcgacttgtggtggcacgttatggatcgccactgtgctaatttcaaaccttcaaagcatagaactccttttgaatttcatgctaagaacgctgagcgaacaataaaggcgaaaaatagtgtaccttcacgccaatcccttaaacaacaaatgttgcttgaaaaatctcaaccaaattgggaatttcttgattctttttatgaggggaaaagaggtgagggtccttggcaattcgtaaaggacaaagttcgatgtgctgttgacggcacttacagagctttcacattatttgtaaataagattttgcatagtttgaatcctttagtcatagtattaggcccttttaagcaaactttctttgaggtttttaataatcttaaagaaaattgctatgccatgctgcaaaaacactggttagcagcagctgttggtgcgtccttagtcttgggatttctctttttattagctgttatttgtatatgtaaagtatttactttcttagtctcccagttaggtttacctgtagtaactctttcatttcttgtaacaggtttgtttgttcttttctttactgtaaatggttttttagagcaagctgctgatgtacagttgtgtgcgttagtcgctgatgactttattcggtttttaagccaaaataagtcctatggagctgtcgcaggtattgttgctgatttgcaggaggatgccaaaaagggacagggcataacttggtgctttcaagcgctatataaacttatttccaggttagtgccctcaggagccaaggaaactgtagctttgttcaactccataggtagcttgagcaggagtgccaaccatggtaaggacttcttcattaatatgaaggaaatggttgtcagctggatggacgcctttcatgatgcacttgctttactaggcgatgattcagttacagctattcatacactcaagtatttgtgtgaagaagatttcctggactgggcaaagaaagtcgaaagatatgctgtggatacttatgattccatggtcatttcgccctgtgagcgactcaagattttgcgattattagtcgataagcaggaaagacttaccaaggcattcttccacccaaggattgctcggagtgcacctcgtctcatgttgaatgagtttactcgcttatcaacattgctcagggatgcacataatgcgctttctagagcctccctgtttgatcagcgacgtattccccctttttgggtgcacttgtattctgagaaaggaggcacaggaaagtccatggcgactctaccactgggtaattatcttttggatgttattgaggagccacaaagcttgcgcttcgttacacgaaacgtagcttccaagtttcttaatggctaccttcaccagccatgttttgttatggatgagtttggcgctcacccaactcaagattatagtgatgaagtcactatgcttgatttggtggggccaaaccctttgacacttaatatggcagcgcttggagataagaacattatgtttaactcaaaacttattatctctaatggtaatagaaggttaccacatcctgaggtcaaattgggagccaatcttgatggttttctccgaagaaggcacgtgctggttgaagttgttcgtgttgaagataaacctcattttaatgagtacatattactacaaccacgcacacaagataagctctacttggataaggcgtttcggccttgtgttgatcccgtgcaactaacgcctgatgagttttatgcagtttgtgctgagcaatttatgacacatctcaatagggaaggtgaagttatacaacaacacacgggtgtttaccatgtgcggtctaatgactttgattttctgcgagattacctcatgtgtaaactcaacttagggctggatgttgatgaagttgagcgcattgttacttcatatgctcatagcaccaaaggagaaaccatttttcccatagaacatgaacacatttttgaggcgtggaaagccgaattggagtccctgactttatctgagttaatttctatgttggacaaaaaagtcacggaaacatttgtatatacattaattaaaaatgatagttctaatgttttaatttctgacttaactccttatgagtgtctgatttatcagttttgtaagctcaagtataagagtgaaacagatgctcagtttccaagttttgaggcaaaggaagagaagttgccatggtacatagaatttatttctttttgtgcgaagcttgtgtcccagctaccaaaatggctgattttgtgtgttgctttgtgtgccgttttgcttgtaggttatactttaattaagtttgctctgtatatgttttcaggagctttaactcttttaggtgttttatctttttcaaacttgagtggacaaggcccagaagattcccctggttttgataatgcccgtaaaactcaaggcattcgtgtgaagtgggaagatcgtcctgcttatggcaaggcttatataccaccagatcaagacacttttgcctctcaggaggagtttaacaagtactggactagtggactcccatcaagatggtcagactacgagggtcaagggccttctgaactggaccaaagtgtcataaatctgctcaagcatcaagtcgtgttcataaatgatatgacaaaagttgtctacaatgccatagctcttgggggtagaaactttttgataacaaagcatgtgtttgatttgatgccagtcgccaactatagtctctatggttatgctatcaccaagccaaaaatttggatagataaccgggttcgacctaaaatccaactgaaagatagagacttagtcattgtggaaatgccattaactgtgccatgtttttcttcattgccaaaggatatttttctgaagaatatgcaagaagcgccaaagcaggttaatgctgtcttggtcatagcggagccaaattatgagggtaaatctgttgctaaacttgtgcaaaaatttcaaccgttcaccaatttacctcaggttcatgctaaagacacatacagttgtgggtcacttggaagccttcgtatgcccccgtgctacagctataccttcgacacttacccaggactatgcacatcccctctcatctgtatgagtggtggtcgttgcattctcttaggattgcatgttgttggaaatatgtcaaaaacaggtttttcccagattgtcactttggatgatttttctgaagtaccacttcagagtggcacacttgttggtgaaggacctgaatgttactgcataccaacagcctcatcggagtgttatggatctgttaccaaacttggtaagtggacagggccagcgccttattttcttgagaagacatctctggtaccatcaatgatatctaaggatatagatatagagatgacgacagaaccagccatattgactactaaggacccacgacttgcgcatagtaatgatcctgactttaatccttttaaagcaggtatgcttaaatatgctgttgaggcgcatggtttcaatgaagatgaggaattttttgaagatgctctagatagagtcttttctgagattcctgattttaattgtcaagagttggctgatgatgaggtgtgtaatggtattgaagatgatccttatgctgaaccgctggttatgcaaacgtcagaaggttatccattttgcacacaacgaccagctggtgcaactggcaagtcttggttattttgtggttctcctggcgactggcacatactcccaggttccttacttcacaatgaaatgaataaaatggaaaggaatttgtcccaaggaatttttgagcctgttataggtatagattttccaaaagatgagaaggttgacaagtcgaaggtgtacataaaacccaaaacacgacttttcaccattttacctgtacattacaacatacttgttaggaagtattttttgagttttgtatcacagttgatggcactccacaacgaaacacccacaaaggttggtattaatcctttaagtaatgagtggggtattttgcaatttgctttgagtgccaaaggagaaaattggtttaacggagattatagtagatttgatggaatcacacctaggagcgttctcttgggtattgtcaaacgtatctctaaccgttttgtgaataaaaattccttggccataaccgacaagacgttatctatcaatggagatcttgctagatccttattgatggacatggcttcaactcggtatggactaacacagggtgatttatggtatgttaattctggtataccatcaggttttccacttactgtaattgttaattcattggttaattctttttttatacactatgcctatatgtccatttgtaaaaagagtaatgatatggacctttaccccttgtatagttttaagcaacttgttagttatgctgtttatggggatgataatatagtttctgtgaatgatttaataaaggataagtttaacttagtaattttagctgattttcttaaagattatggtgtaacgctcaagaatggtgctgataaggatgaggaaattttgtcacccttctacccaataagtaaggtggatttcttgaaaaggaagtttaccgttctacaaggtcatgtggtcagtcctcttaataggatcaatatcacggaacgtttacattgggttagaaaaggtatgactgaagtggatgctatagttgaaaattgccaatcagcagccttcgaagctgtctttcatggtgagcattactacaaggacatctgtggcgtgatcaagaaagcatgcaccaagaatggtataacagtagatctgcctacttttcaagatgctcttaacatacacctctcaggtggtagttttgctacagctatacaaaccatgtccctccaactacctaagaggatcaatttcttacataagagctaccaatgtgtgaacgtctttccagatgtttattttgttaccaatgaaagaaatgagactgttcggaggcttcttgagcgtaccaccatacaaaatatttgttacataactcgtaattatgctagcaagaataattcccaaagtttcttcactttaagtggggaaggttggaagatgtgtagttgggaggcgcgttataaagtatacagtgccatgaaaagaccagtttattttgttgatgaggcaaatgatgggttggccatagcctacgcacttgattatagttacagaataggtgatctcgctttttctgatcttagcaagatggcggtagcactttgtggacacagacaaactatgtgttccaatatactcgataacttttccgctctttctaccatttag

SEQ ID NO: 567 - DNA, 5553 bp, Arabidopsis latent virus 1
  source 1..5553: mol_type = other DNA
atggctactattactctttttaccggtaatgcaccacatagtttaattgcgtatatcacttcaaaagatgttgttcacatgctgaaatgttatgttcaggtggacaactttccaagtgagtttcaaatttcaaatcggctgagacgcttaagggagagtcattttgacttgatatccttaggttattcggcttttgtattgcacagaaatcatttggcacaggaaccctatgaagtatattctggtgatttcatttttaatgattatcatcagtttctttgtgagacagttaccaataaaaatgcacttgaaacattgaggaagtacattcgcactgcctttttggcgtattttgatgaaattatcgaattcaatgaaagttcctatttgttggatgacgatgacatagacatgcaaggtactagagagatgttggcatcgataagcaattggatttcagccacatgttcttcagctgttgattggacggttaatgaaattatgaagagcttcaaagcacattttaatggtgttgttgagaggtattgtccaataggagtgcaagtctgtggttggatcacgaatgtctgggacaaggttaccgcctggattgatgagatattggaaagcattaattggtttttgaaaggaaccaaggagttgatagtatggggagtttgcatattggcatcaagttgtgctattggtgttttggaaaaagccttgataggtcttggtttcatatcaggaggtcttgacttggtaaagacttttttgacaggctcagttcttacagggtcatttatgtacctgaaagggtttaagaacgaagagcaagttacttttacagcaatggtttccctcatggcagggatagtgtccacggttattactgcagcttttggttgcccaactgttgtggttgctcaggcaggaccaaatgagctgcttgaaatggccgcgaatggtcttaatgatttttgcaacacaactcttgtttcaatgggtaagacatgccaagctgttaaccaaataaccacatgcgctacaaatttgaaatcgctagctggaaagatattctcgtgccttcagaattttatttggcaaatgtttggtatggaatctcgttttttgcgcgatgcttctcttatgtttgaagaagatcttgaccaatggttgaaggacattacaaaagcccaggacacttttttggctaaagcctatgctactcaagatgatatgatgcaaatgcaagttttagttaggaaaggtcaaaaaatgcgtcagaaggttttgaatgcaaacacgaaattgtcacctgttctcagttctaccattgtaaaaggggttgatactattgaaaagctcttgcgagatgccacatttcagggagttaaagcgacgcgcaaattgccgtttgttgtttatgctcatgggagatcgagagtgggtaaaactcttgtggtcaatagattgatttctgattttcaaacacactttggactgccttctgacacaatttatgctcgcaatccagtggatagttactggtcagggtatagacgacagccttttgttttgatagatgactttggggcggttgaatgtgacccctcaatggaggcacaattgatacccttagtgtctagtgcgccttatcctttgaccatggcgtcaatagaagagaagggattgttgtttgattccaaatttatattctgctcttcaaacagactcgagcctagtcctgagagcaaggtccatgatgatgaagcatttagaaatagaaggcatgttttgattgatgtgtccctcaaccctgacattccctacgatccgagtgatgttaccaaaaaccagatttacacaatacttaagtatgacctcactcaatacattcgagtggcagagtttgctgattatggagatttgcttgcctattgcctgacagcatgggaaaagcatgatatggaacaaactctgaatctggagaaggactatcaggagcccaaacttgacaccgattttgaaaagtttgagcatttactgacaatggcagtaacctacaacaccccgctgacggagctgcaatctctgatgaagatgcgagaggatgaagagtcgcagtatgttcactttgttagttttaggcgagaaggcaaactgtggcactatgctcttaatgggaagatgcaagtatgcgagtggaaacaagaggttacaccagatgaagaacttgttttagaattaaaaagtgaaaaattgttgcttcagtcttacaaggttttgcgatattctgagagcaccaacttggtaattaaaactcacttggatgttttagctagagaggacagttacgatgaaaagatgaatttcattggtatggttggaaaccccaactatcatgctcaaataaagcccattattgacaaaatgccttcatggcaaagactcatcatgtgcggaatgggagcgatgttggcccgaaagaaggaaaccacttggtattcggctatggtagagggtatgaaagacaccatgtacaccatgtatagcaaggagattgaacaatggcctattgccttgaaagtggttgttggtgttgttttggcaagtgttgctggggctggattctggaagctttatgacgttcttaaaaacgccgggaatggaggggcttttgcaggtgccgcagcattggaatttgctgtaggtcagagtcgtaagccaaatcggtatgatgtggcacaatacaaataccgcaacgtgcccataacaagacgagcttgggctcaaggcagcatgcctattgaacacgctactgcagcgattatgacaaaaatcaaagccagcctgcaatatggtcgcactgaagtgcaaatagtgctgttgccaggtagacgtttcttaggatatagccatttctttagggaactgaaaggcagtttgatggttcagatacacactgccaacaaaacatactggcacacatacaaggcccagaacatggagtattttgacaacagtgagttgtgcctttatacagatggttctttggaagatataccaagttcatgctgggatctgttctgttgggactttgaaagcaagcaaatggactcttttccagctgagtttttatcgtgcaaacccgcagtggggactggagcgccacaaccacaatgggcacccatagaagttaaactgcgaaccaagagtttggagatcagagatggcgattatgtacgtcgtgtgcccatctatttggaatatgcagccccaaccgtcaatttcgactgtgggtcgttggtagtagcacgcgttgggactacttatcaagttgttggtattcatgttgccggacataataatagcttgggctttgcagcgttgctacccccagtggctccagttgcccaagcacagtgtgcgcaaaaatactttgaattctatgctcatgaggaggaagtcagaaatggcatagccatggtcggtgaactcaagaatggagtgtggatacctctcccaaccaaaacttctttacaagaaacaccagaggtgtggcaccttgaaacgccgtgcgataagtacccaagtattctttctaatgatgatgagagactcaagatttcaggatgcactgattatgatcctttttctagtggggttctcaaatatgctgaacctatggggctgctggaaacagaattgttggatgaagtttccaacgagattgttgaaacgtggtttgattgtgtcgaagaaggtgaagaatttgaagaagtaagcatggctgaagccttgaatggtatagaaggagtttcatacatggagcgaataccactttccacgtcggaaggttttccccacattttgtctcggaaaaatggtgaaaaaggaaaagggaggtttgtggaaggtgatggaatggaaatgtatctcattcccaacacgagtgtcacaaaagcgctagaggaattggaagctgatttggaaaaccatgttcccacattggttggaattgaatgtccaaaggatgaaaagcttccctatcgaaaagtgtttcaaaaacccaagacgcggtgttttacgattctccctatggaatacaacttactagtgaggaggaaatttcttcgctttgtacggttcattatgagacgaagagacaaacttgcctgtcaagttgggataaatccatacagtatggaatggtcagaactcgctagcaggttgcaggcaaaaggagacaacattttatgctgtgattacagtagttttgatggtctcctgtccaaacaagttatgcgtagtattgctggaatgatcaaccgcctctgtggtggcacagagcgcttgagaaaggagcgtgagaatttgcttatggcatgttgttcacgcttagccatatgtaagaaacaggtttggaaagttgaatgtggcattccatcagggtttcccttaacggtcatttgcaattcgattttcaacgagattctggttaggtacagttataaagcaatattgcgtgagcaaaagataccaaaaatgatttcgttgagttttgatgattatgtctcactggttacctatggggatgacaatttgatcagtgtacatgggtgtgttcgaccatattttgacggcaccaaacttaagcaatttctcggcaaattgaatgtcgtgataactgatggaaaagacaaaacaagtgaacacctcctgtttcgcaagctcacagagtgtgattttttaaagagaggttttctgcaacgttcttccgtggtttgggatgctcctgaggaaaaggcaagtttgtgggcacaattgcattatgtgaataccaacaatttggagctacatgaagcctacaaggtcaatttggtaagtgttttacgtgaattatatatgtgggatccagtagaatgtgcgagttttcgcagaaaagcactaagaaccattagttggttgagcaaagaagatgtaccaacattagagcagattaaggaattctattccattcagcgccagcaaaaattgccagatagtgcagatagtatggatttgcttacgcagaaagaaaatcttggaccaatcttggcaccaacaggcaagcaacatggatttgaatttactgaatacgtgaggactgtcaatttatcggaacatagctttgaagaagctacaagtgaggaactgtggttgctatgcaacacaatgtatcctcagaatcgcctacctgagaatgttatttcagtaaattggcagcaaggtgtaggtagaggaggacttcccacacagcattggatggaagccaatgtgctgcggagaaatagtaacttgaggcgagttgttgacagcgcacttcggggaggaaagaggttagtgatagctactcgtgaagctattttgccatgcaatgtgcttgcgattttgttcatggtacatgccggaacaatacccagagaaacaagcaactctacattgacacaaatcattgaacaagtcaaaacactgggttttttgcccaaggaaatacctgccgccttttaa

SEQ ID NO: 568 - DNA, 6843 bp, Artichoke Italian latent virus
  source 1..6843: mol_type = other DNA
atgcggtcctttgtgaccgtttcccctgatggggattctttttcttttaatttttgtaaatataataatagtttaaataaatttcttttatcttctagtaatttagatgtcgtccttgacgactttgatttttatttttctttttttgtaaaaaaatatattattttagagaatttttggcacaacaggtgcctttctgctcttaccacaccagcgggtgtggtggttaatacgccactttacgtggcttttgctgagcttgctcttgacaagctcaggattaatcccttccaccagctgtgggaggaaacattggccaactggccatgctgtccaggaacttctctcctggatttttgccggactcaatatgagatccgaagggaggctgctgaggcctctgctgaaatcctccgtctgaaggaggttcaacgccaggaggcgttcgatgccgaggtgaaattcctcgagaaaaatggcgttcttcccgcctattcgcgtgaatttgcgcgaaaaatctggtctgctggaaaagaccagaagaaggccaggtctgccctcctggttaaggttaaaaaagggaaacagctcaaacgtgagtgggaggaggcttgcttccgagctcgcgttagggctgagctagcgagggaatttgaaccctcaccccaccaaatccaaagagctattgaagctcaagcttttgctgataagcttgggcggaaatatgccactcttaccgctcgggtgcgagcgaagcgcgctgctgcgcgggccctccgtgagaaggccatctatcttgaggttcaagacctcttgaatgcacccctgctgccacccatggaaaaggtggaaatgattcggaagcatcgcaaagtgcgaccgacgggatccaacgtggtccacactcccaagcgtaatgcgcttgaagacctctgcccataccagggcttgggtgctaaatccgccgatgtgcggtgccaggccaccttgatggctggcaaaatccatgcgacctatcccaggcttgccactgctatctatagctgggtgttgggtccttccatgaggtttgaatgtgtggcccccattaagagttttattaaggggctaaccttcatggttgatttcttccccgaggaagtcctcatctcagagctcaataaaattgaaactgaagctcaatgttttgaggcctctcttgtcgtggaggaggaaagggccaagctggaggcccatgctgagaatgccaactgtcgcgctaatgtatttatgcgtgctatggcaggagtcaagaacatggcaagatgtgcctattctggttttctgtctggttgtgaagaggcagggcggtccctatctgagggaatatgcagtgttatggtagactctttccgcaaatgtgtggagatggtttccaaggagctaggcactgccattgaactaattgagaccatgattcgaaaagtcaagaaatggttcaatgatttattggaaaagctccatgaaggacttgccactctgggcaaatatgcgatgtatgcactcgcaatattgcttggttgtggcttgactaccctccttgagaattgtataggaggaagaggtatcctaacttcactatttgtaagtggagtttttgctgcaattggattgcagtgtgctggaggttgggataacctacagagagagatggtgcagatgtgcacggccctggcagtcgctgtctttgattgccaaaacacgggccgcagaaatgcacaggggcaaccgattgtaagtccaataatggacatccacaatgcccatcatcttgaggatagacgtaccagaagaatgactgatgaacagggaaatcttagatccatcccagtcatctctggtataataaatgctatgtcgcagtttggtaccggtttgtgctctatgcagtctgcctctcttattgagattggcaagataggagccgcgtgccattctatgcgcatggggaaagaagccttgaaggaattctgctccaccataatgtattatttggggagagttgccgataaggtcactggacgagagacagtttttttcgacgaactgtcttctttggtaaaagtaaatgtccgtagttggatacttcaagcacagtcctgtgtgcgagaatcattccatacggaaattggcaatgcatacttccgcgatatggttgccaagctagtcgaagagggccaatcgatccagatgggggttaatggtctaccgcggaaaatttccgctgattatggtcagctcgttggacagatcatgaaagatctactggaactccataagagaaccattcgagctggaatcagtgaaggtcgtcgccctgagcctgtatggatatatctatttgggcagcgacactgtggtaaatcgaacttcatgtcaaccctcgataatgaattgtcaaaatattttgggttgccgaataccacagcacacaggaatggcaaggaccaatttttctctggttataatggtcaaaccttcttgcacattgatgatctatcatgtgtgaagttggatcctcctttggaggctgaattgatcaatctggtttcttgccaggatgtgcccctcaatatggccgatcttgctgataagcccatatatttcaggagtccttttattattacttctagtaattttgaggacctgcctgcggccacaggggtgagagatgtggaggcctatcgtgcgcgtaaagcatgtctgattgaaatgcgccgtaagcctggtgttgtctatgatccggacaatgctctggcggcctcacaagcccgttttaaggatcccatgtcccagatgctcatgcctggcatggatgaagagacctcctggatggaaatgtctgatgttattacggaggttctaaatatctcagcgcgccatagagctgcacaagataaattgcaagcgcgttttctgagagaaaaagccatgagtgatcctcttgcacttgcatcggagaaatttttgcaaggggatgtgaaaaactgttatcttgacttttctggtattgaactggaaaaagcaggaatccctcgcccacaaggcggtaggggactctatgttgatgggaaagtctaccttttagatgatctctgtcagctagaagagttggagatagcagaggaaggatataagcgactctgggaggaacgtatgcgtctgaaatttcttccaagggtgcaggcaaaacaaatactgaatacctcctctatggtggttacagggtttttgcgctccttggtgaatggagactgtgcggttctctcagtagactctttgtccactggggccactgttggccagaaatcaatcttccatgggctacgcgctgatgagagaatctatttgcgtgttttgcagcaccaattagatttatattccatggagattccagagaatccctatagcaattctgcctggttaaaaatactcagggctataggggccggcagagactttctcgtgaaccatggttgtggtattcttatggttgctgcagccctgtgtttgattctggttgccggttttggcttctggaagctttttgttggactttttagtggttccatgtccttgggatctgccattgtcggcttttccgcagtcgacataaaggcacaacataaatcttccagtcaagaaggaggatatcgggctagaaacatcccgatacatcaccgatacgcatatgccaaatctcaggcaggtgatggactcttaccagctgcgcgactttgtgttgccatatatcagccgggagggggttttgtttccgcaatgcaatataagaacaaatccgtgcgaatgacaaggcaccaagcattgcgttttaaagaaggtgaacagcttagtgtaatttttgccagtacaggtgagtccaaactcatcaactggcataaatatcacatgagagaggagcccaactcggagattgttacttggctagctcctagtttacctgcccttagtccggatcttaaagatctatttctggaggacaaggaggtggaattgcccaaccactttaaaacaattgggtatgtcctgagagttgacagcacagcgtttcattatgatatgcttgatacttacgctgctgtcgacaaaactcccctcccactgaagggggtgttgggtagtgaactctatttgcatgagatccctgagaagctcacatttcattatgaatcgagaaatgatgattgtgggatgattctgactgcacaaatcagagggaaaatgcgagtagtgggtatgcttgttgctggtaaggagaagaccagctgggctgatattatgccaccaaactccttagctgaactcaagagccaaattgaatatattcctgagttcggagaggcgtgtgatggccattttaaggttggctacgttggaaaagctgacgcgcccacactaccaaaaaagaccaatatggtgcctgtccctgctcatctgagggtaccatgtgaggtcccaatcaaggagcctgcagtgttgactaaagaagatccacgctgtcctgcaggtgtaaatccgcctattgctgctttgaagaagaaattcactcaaccaatggcggaattggagcaagaaatcctcgatgaggttgccacggatatccttgagacgtggtatgattgtgaggaccatgtcctctccgacattccattggaagttgccatcaatgggattcctgctgatagcgaggaggcagaattggaaaattttgtcatgaagacatctcctggctacccctatttcaagaacaatagagctgaaaagcttaagggtaaatctgcatattttgaagaggcggaagatggtaccctaaagttgaaagaagggggaatggcagctgaactccacgaaaacctggtggaattcacaaagaacgaggttccggaattggttgtaatcgaatgtaccaaggacgagttgcttccggaacgaaaaatcaaggttggcgcctgtaggttgtttgagataatgcccctgcattataatctctttttgcgccagaaaacttgtgccttcacacaatttctacaacacaataggcacaagttaccttgtcaggttgggacgaatccctattctcgcgagtggggtcacatgttaaatcgcctcatgcgcgtcaaaaccaacgaggccataaactgtgattacagtgggtttgatggacttttgaatgctcaggtgatagagtgcattgctaagatgataaatcggttatatgcactctctggggaatcagaggttcaacaggctcagcgttataatatgctgatggctcttgttggtagatatgctttcgtagggcagaaggtatataaagtaaattgtggattgccctccgggtttgcactgacggtggttgtgaactcggtgtttaatgagattttgatccgttatgcctacaaaaagttggcaccaacacctgagcgaaatagatttaatagcactgtttgcttgttggtttacggagatgataatctcatttctgtatcaccgtccatagcctcttggtttactggggaggccatccgtatcactctcaaggagaaaaatgtcaaaattactgatggaagtgataaggatgcgcctaccatagaggcgaagagtttttgggagctggactttttgaaaagaaagtttttaaagcttgacaatggtattgtccaggctccccttgatcggtcagccattttctccagtttgtattggttgacccccgataaatccaaattccacgagtcccaaaaagcaagtgactaccagggagaagtggatgttgtagaggagctcattctgaacgtgaatgttgctttgatggagctctatctacacaatgatcctgctgaatttcagagagtgcgcggattttatgtgaaaactctacctttactggtgagtcaattgcgcacatggtctttctgtgaggcctttcattcccaacaacaaacgggaatgttgaagtatgatccagcagtgatccttgaccacatgtccggtgcagattttaagaaattcatgcatgtatcggaacaaggaaacaaagcccacttctacactgatatattgggagtttctggtcctcactacaagccacaggagaatgactttgtcgtctctacacttcctctgaagatgggagtggctggtgagcatgttccggtccagtttggcaccggcattggtggtttacccacaaagaagtgggtgggggattttggtaggccttcacgactgaaaaatgcgaaaggctaccttatctacaatttgctgcgagagcaagttgaggcaggaaaacgacttatttttatgggtcctgccccctatgtcgcaaataatgcggcattgatctcgtttgggacagcagctaaaatgctcgtccagaaggatgcccttgtctactatcggaatgttattcctgaggcaacctctggtctggagcaatattttgatgctcccttgcccactgccaccgttggtacattttactttgccaacggagaaacatatgctgctctctgcgagtttaaggatggtaaagtactcaattatgagggactaccaacccagtgcctgaatcaggccgtgaaagagaggaagctaccatgcatggcagcagggcaggtgaggaacaaatttattgtgtcccttgtctgtgataatacaatgtgcccacaccatagatccaccaggcaaagctatgaggaagccttccgtgagtgttggacttctaaatgcaagacaagtgcttgtgtggtgtcaaagtggtatggcacgaaactttcttag

SEQ ID NO: 569 - DNA, 6519 bp, Blueberry latent spherical virus
  source 1..6519: mol_type = other DNA
atggaatatctttctcgttctcagctgaaaccccgtgggggcaaggttccttgtggggtcgtcccacgcgctgtcttggaagcctctaggcttgccaagactatattggcaaaacctgccaatttttctcttaccttcttggctcagggtgcctccctgaagccacgttctgttgcactagcttgtgcaaacggggtcattgccactggccctggtttctgcatctataccccagagggtattcccctttcttggggagatgcagctcgccgggtgaagcccttctgtagggccctggccaagtctgaatctggtctttaccagaagatgactgaagaacttgctttccgcaagttccagaggcaagtgcctcatatggtagccgccagcaagcggctatcagcccgcaagcaagcctcgcgggcaaagggtgctgcaaccgttgcagcacgatcagcagcagcaactgctgagttggaagctcgtcgcgccgctggtgcgaccaagaagagtgctcttcgcagggcactcaagaaaaaggccaccaaaaaggtggtctctgcctctgcagcaatgcagagaggggagccaactcttggctccatttttcctttttcttcctctctctttgagagggtttctgtacgccccttgggcgtcccttttaatcctcctcaacgggaggattttctttcttcttcctcccccattcctgcatgcccaggaatgggtatagcttctctcccccttatggggagaattctttctcttgctccccaagtggagcaactttgtgaactttgcgctccaggcgcgggttcttctttttcttccgcagttgcggatctcgcttcttcttctactcttcatgagcgagatgtttttttccgagctatggtagcaatatcacagctcttttccgcttttcccaatgcatatattcttgggaattttgtaggatttcatttttataattgtgaagctatattgaatttggttgaacaagccaattctatggctttatattatatttgtctttttaaacagggtccaattgtacatagtttcttggattccttttctgatgttgcctcacatatttctggagctgccagaattgtgggcaatgttgtaaaaaatttttcttcttctatttttgattccattcttaacaaatgtgaatcaattttctttaaaattctttcgccttatatggcaactttgcattcttccaaagtcgaaattgtaaatttttggaaaaaatgtaaagattgggccacaaatttgtgggccaatgcacaccttgctcttcaagggttaggtatgtatgctatttgggcattagttttaatgattctttgtggcattgtctatcttttagagacaatgttcataactgctggagctataagttctcatggcttattagtttcaggctttctgtgtttggtgatggcagcttgtggctacactgttttcgcagtgggcaaagaatcagcccaaatgattcgggttatgcgtgagtgtattctcatggctgtgatacccgatgatgtcgtcaaagatatagctgcaataccagctccaggagagcaacaggtacatagtcttttagatgctgctatggtacctattaaatttttagattctttagcttctggtttatccctattttctacaagttcggttaccgtcttgggaaagttgggaaattctttggaaggaatccgcaaaggttataattgtttagcggattttatttctatttttttgaattataccggtgtttgctgggaagctgtctctggaaagaagacatctttctttcgtgatttagcgaccaccgttaaaataaatgtagctaattggactgaagatgctagacgtctcattgaatatcatgagatggctggtcttcttgataagtttgagtacgagaaagttcgcactcttatttatcagggagaggaaatggtcgatatagctaataaaggtcgatcatcccatacttcaacttcttttttgcggaccgttggttcgcttttgaatgatttgagagatgtccgtgccaagtgtgcacggtccttacgttttgacggctggaggcgccaaccattttgggtgtatatatttggtgcttcacagtgtgggaaatcaacattggcaaattatttggcgccattgttgttaacacatatggggtgggatgctcatgatgtatattctaaagatcccactgaatcttattggagtggatattatcagcagaaatgcttaaagatgaatgatttatctgctgtgatacctcgaaacaatgtgcctttagagcaacaattgataccactcatttctactgaagagaagatggtatcagctgctgaatgtgagggcaaaggcatacaatttctgtccgagatagccatttcttcctctaatgttgaagatgctcctactgctgctgagcttattgatggaaatgcttatcgcctaagacgaaaagtgtttctacgctgtcggagagctgcagtatgggtacatgacgataagggaaatcgtactgaagcaatagatgctgagggacagataatcaatcgtgattacaatcccagtgatgcactagattgtgtagaagtacaatggctacattctagcacaggactcccgttaccaggtcctccagggcaatggcacatggctacctcaacaattccattgattaaggatgctatggatgcccatttcctccaggaagacattaagcgagatgcctgggttcagcaaaccgatatgaaatctaagacgggaagagaagtttcttcttacttgtctggattgatgggtgcgctaggctcatataaggcaatacaacggagttcagaaacttcagaagcgggagaacgtaagttcctcgttgctgttgatggacagatttattctttagatagtcaaggagtagctacattagaagcaaatgatgcttatgacaatgtagaagctttagaggctgtctcactaaatcaatatagattagatttttctaagcaagttagggaacattgtctactaacttgcaattcttctttccattcttccttagttagggacatattggaagacatgcttgtaaatgatgcttgtattatttctgttaataaaattagcagagataccaagcagatacatcgtgatctttggaaagagctaaaactgagtgagcgggtatttctgcgcatttcacaaaaagctcttaacactcttagggaacaaccgcattttaaggtagaccttaagagccaaattttggattcttttgctgttttccgggacagtattgtagataatagacaaaaaattcttttatttctttcagctattctactggtggggacgttatcatggagctttttatctcttatgaaagccttcctatcaggttcagttggatttgggggtgcacttgcactcaaaaaccaattggatgtacattcttgtgctgcatcaactgcttctgtggcaacttctgtatattcttctaattcaattcctattgtttgggctcaagctgcacgctacgccaatgtacatagttgtctagaagaaaatcataattttaaatattttgaagatggattagcccatttgctagttcgtcttgtaggtagtagtggcataagtgagaacgcaattttatatggtccgcgttcaatagctctttgtgcccaccaaattcggttgtttcctgatcatgaccgagttcagattcattacttggacaggaatcatataccaaaatgctttaattttacatggcactatggtaatgctcttgaacaagacgatacagaggtatgtatataccgagatgatcagcttactcctcttcccgtgtatagtagaaatttatatattccagggggggagaaattagcctcagctgtaaatataaatggagtttgcataaagaaacgtaagttttttcatgctgactctttgacacaggctgagcgccaactggatggagagaccccaattattcgttcatggtctaacgttggggccctctgcactagcaaacagacaatatcgaatccaaaacctggagttgcttatagtcgaacattaaacaggtatttgaattcgacctatgctagtggtgtacatgatagtggaggacttattaccactatcaaagatggagtccgaaaagttgttggcctccatgtagcaggcacccaagagggacatctttttaagtccacggttgcctttctccccactggaagttttgcagatatccattctggggaagatttttttgttccagagagtgggatcgaaactgcaggatatgtaaagattggatatatcaaaaatcctgcacttcgacctcatgtctctaccacttctcaaataggtagggttactcctaatttatgtattcctttacctacctataatatagacgatgatgagcatttcgtagatgctgatgaagtttttgagatcaaagagaatgcaattctttcaaagaaagatgagcgtttaaaagatttgatttcaaatcctgaggccttcaatcctttgcaagatggcatggttaaatttgctaatccaatgttgcctcttgatgaagagattttagaaaaagtttgtgatgatatgttcgatacttggtatgatatgttgccacaaactgatatgggtgctccccagtttctccaaaaagttgatttagatatcgctttaaatggcatccctgatgatgcttgcatggaagcaatgaaactcgacacttcagagggttatccacactgtgttgagcgagctccaggagaatctggaaaacgtcgttttgtagaagtagatgatacttttcatgtctctttaaaggaagggaccaaagtatatgaaaattatcataatttatctaacactatttcaaaaaatattcccgtcttgaattgtgtagaatgtttgaaggatgaatgtcttaagaaaaggaaagtggccactccacgcctttttgatgttctaccctttgaacataatattcttttgcgtgaatattttttgagtttttccgcatttttacaacactgtaggattcagttgccgtgctgtattggagtaaatgtatattcgagagagtggacaacactctatgatcggttacgtgagtactctgatacaggtctcaactgtgattacagtaaatttgatggctacatttcgcaccaaatatatgggtggttggctgcaaccattaaccgtctctatagagatggtgtggaagcaaatgctgctcgtaataatttgttactcatgtttattggtcgtcgctcaatttgtggtggccaagtatacatggttaatggtggaatgccatcaggctgtgctttcacagccatgatcaattctttatttaacgaaattttaattagatatgtttttaggaagtgtactcctgcacccatgaaaaatttttttaattcatatgtgcggttgatggtgtatggagatgataatcttatttccattaaggaggaagcaattccatactttgatggacccatcattaaaaatgagcttgcgcaagtaggtgtcattattactgatgggactgataaaacatcccctacacttcaacggaaacctctagagtctctcgattttttgaagagaggttttagacgtttatccacagggatagttatagctcccttagataaaacttccttatatactaggttatattattctacagctggagatgatggctactgcaatttagatgtcttgcgtgccaatgtcaaaagttttctggaagagattgttttacacccaaatcatgtaaatgaattttttcgggtgcgatcttttttccttaaaaagattccagcttgggctgacttcctgcccacatatgctgctgctcaagattttcattataggcagcaacaaacacagtcaccatatttggtaccgcgcattttagagacgcgccctatggggactgaatataaaatgatggctggtcaagataatcatgataatattgtatggttgaccagtcgagtcgctatttgtggtccaaagtatccagttccctctggaccactacactttgtagttgctctctcttcatttgtgcgaacatgtgaacgtggagttaattacaaagttgatattgctgagggttcaggtcaactaccaacacagagttggactgattccttcagcagttctaaaaagagaactgcgctccacaccgcttatggcgatggagctactatatatttccggtctgtcatgccttattatagttcatggtgtgcagccggtagatttctaaaatcacagggcatttccacaagtagtgtaattgccctgtttgaacaatataaaccagcaaatgctggtaatattgcccctttgttggctacaaaggaatataggcgttatagccatagaccaatatttgatttatcaagtattaagcagcatttagctgcttcgtaa

SEQ ID NO: 570 - DNA, 6288 bp, Grapevine Bulgarian latent virus
  source 1..6288: mol_type = other DNA
atggcaacttttaagatgggatccgttgtgcttacaccttgttttcttgcaaaagaacgagaactggtgcatcaacttttacgttcgtcttcttcttttgccgttacttttttggctcaaggtgcctccttgaagcccatcatggtggctcgtgccatcattaacggtgtcattgccattgacaccgagaactttggctttgtagaccaaacttggtccgaggctgcacgagtggtgcgccgatattcattggcccactcaaagtactgcaggaaggttcgcgagcgctctgcaaggcgctttgctgaaaggaaagctgccaggaaggcagctggtgtgaaggccgcctgcaagcggatactagcatctcttgatgccgacctcccttgttctgggaggctgatgtgggccattaaaagagcccaccgcgaggatttcgcctcgcgaatgaaaacggcagaaatttgccgtatgatcagagcctccaaaagggaggaaagagcctatagggctcagtatgccgcacttgaagtgcgaagacccgtttcaatgcgggtgccctatgtttgccccctggtggcaaacagagaagaggtggctggggagccacttagaggtcgcgcttttgagcgcaccccacgcagcacttcctttagtgcatctcctctccctcgtatgcggtcaccatatgaggctgaaattgctcctctctttggagcttgtgatcgtgcatcccgtctggagttgcatccagatataaaatttttctttagagaagcgcccaatcatgcttcttctttgggggatgtggaaagccttgctcgcttggcgaggtgtacaattgcgtattttaaactttttccatgcgcattgtactttgagccgctgcgtcgactcaaacctcagagcacaactgatgagattgacaagtgtgcaaatggtctagagatggaactggaccgcctccgtgaaatatcagtttcggatctccatgccaatgggcttggaacgttcatagctggtattgcagctggcgctgctactgccactggagccgttgttggcaccaccgtagctggtggaaagtatctaattgatcacgcagctgcagcttttgataagagctgcaacaaagtggttgaaacagttgaactggccacgcggaagtttggagagaccatgcttgacatggtcaggaaaacattcgactcttgccttggaccttacttggctactgtgtctcacgcccgtgaacaaattgaaacctattggcgtagagtgacacagtggatcaaaacaatgtggagcaagttgtcgattgaagttcaagccctatttgattctacatggtgggctcttggactgatcctctgcgctggggtggttgtgcttgctgagcatatgctggtggccctcggtgtgttaacgcacgccggagctctaacatccttatttatcaccgcatttgtggggtatttgggatggaattttgcagcacccgccacagaagcggaaggaacgttactcaccacattgcgtgccctcgtgcatattgtggttgagaagccaatgtcggtttttcgctcagaccagacagcaaatgctcccaacgttttggagtttccactcagggtgctcgaaacactcggtaacgggttagtttctgcgccccttggacactccaatatgttgggaaatatggagctgctatggatcaatccgcaagggaaagacgccatgaaagatttattgatgtgttttgattgcatagcggattcttgggattatatgactggtcgtaaggatagtttctttcgagaaattgcctcaatgactaaggttgatatagtcccctggatcaagagcgctcagcagattgtgttggaggcacaaactgttgctgtaacggaccctgtccttatggacacgattacacatttactatacaagggtcatatactccaacggacgttggccggtgcgaagcgcgccacttcactcgattacggacgagtcgtgtcttctcttgttcaagagttgactaagattcgcgcccagtgtgcgcgcgcaggcatctttgagggtcggaggtgtgagcctttttggacttacatctacgggccttcgcattgtggaaagtcactttttatggaggaagtgacacggcgtttattgaaagagaatggccatgctcttaatgatatatacgccaaaaatgctcgtgatccatactggtcaggttacttgcgacaggctgctgtacaaattgatgatttatcagcctgcgtaactgaaccttcggtcgagtctgagtttctccaaacaattggatccaaggactacaagcttaacatggctgcggtagaggacaaaggaatgtctttcaatagctccttgttcatcactacatccaatgtgttcactgcgcctaccgacgctagaattttggataaaaacgcttacaacaataggcgtggcgcagtagttcagtgtcgtagagccccaggtgtggactttgatgcaagaaatccttctggatcgtgtgaagcgcggctggtggatcctaatgatgaaacgcctaagtcagagtgggccaattgttccaaagtgctggaggaggtggtgcacttaaataatgcgcatcgtctcaaggagttaatgctcatggctaattaccgagagcgcaatgacactttgcatcctgtgcacagtggagcgcgtaatttcctgagatcctgtaccaagagcttggctctcgggaatttggtctgcgatggagttatatatgtaattgatcgtgagacagcaacatgtgaggccacaaaggagaagccaacaagtggctatgagcagacagcacagcacttcgtcgcttcactccggcaagaaatttcgaaccgggcgtgtgatggaatgttgaacacctttttgaatgggttaattgaaggtccttgtgaagtgaagagcgtagatgccttaaatgaggcagctacgtcttcgcagaaggagtttttccttgaattgcccttactggagagagtgtacctgcgaattttacagaggcagctgtccgcaatccgtgagatgcccgacttcgcctttaacatgaatgtccgggaaaggattttagctagccttagagtaggttataacactgtctgtgaacatggtggcaaattgctaaccatagttgcagcattagttttgattttggttatatattcgtcattcttttgtatatatagaacctccattgctggaccgacagatggtgtagctgcacttgttgcggttggcgcgctaacagctaatgctggtagtgtgtcaagtgtatatagtagctccgatggcggtttgagtaagttttctcgcaacacccctatcaattataggagtgctgcaagcagtgattttcgtgccaatagtggtggggatgacgaatttttgatgtcattactactgtggttggagactccaggtggtggccttatatcgtgtattagagggaagggtcgctacatttatctgaccgcacaccaagcggaacaaattcctgatggtgctcgtgtttttgctcgcacgagatccgccaatggtgttgtacatacagtgcagcttctatgggatgcaaaacaagtcagacgatacagtgacactgaggctgttacctatcatgacgcccgtttcactgccctccctgagcctatcaagagtgcttttgagtgtgatattgatcaactacctactttgtttgatatgaatgtggtattggtcaagcgcaagagtgctatgcgacaggtggatccaacattagctgccctaccagcggagcaacccattattgattgctggaaatccaacgggaagttaaatcgtgagatggtaggttttaatacctacgcttacggtggtagctatcgtaatgagataccagtgtcaattgtatcgaaatgcaagacgtatgctgaagattgtggggcaatacttaccactatgtggaaagggaaacgccgcgtgattggaatgcacgtcgcatcggggtacaaaaatgggacccaaaatccaaaagattggacctcaacagccacccttctcccaggcattgcagatttggagtgtaactccggattgaatatggtggaagagagtggtgttagttatgaggggtacagaaagattggctatttgccacgaatggccgaccgcccttaccaatcagggaaaacaatgttcgttcccgtacctgaagagatgatgtatataccgaccaatttgtcggaaagattctcagatggcacggaacgaaaagtggaagtggagattaagcagccggcaatcctgtctgctagtgatccacgtattcctgagggagtctcctatgatccgttgaaaaatggtatggagaagtttaagaagcccatggatcttctagatgatgctctctgtgcagaaatagctaatgatatagccgagagctggcatgattgttttgactcgttggaggattgttcagatgaagttgccatcaatggtgctgaggatgaattcttcgataagtttaacatgaccacatctgaagggtatccttgggtgaaacagagggggattggagaaagtgggaaattgcgttactttgaggagaccgttaatggtcaacttgcgttgcgtaaagatacacccgtctataaggcataccatgatttgcaagagctttccaaggtagaagtgcctgagctcatttgcattgagacgcctaaggatgagtgtttgccactcaggaaaataaccctaaaacccaaaacacggctcttttccattctgccgctggaaatgaaccttcttctcaggaaaaagtttttatcttttgcggccaatttacagcaaaatagggataaacttccaacacaagttggtgttgatccttattcacgagagtggggccatatttactctcgcctccgttctaaaaattctgtggccgtcaattgtgattatgcttcttttgacggattgattacggcccagattttgaaacatattggaattgccattaattctgtatatgttgggagcccggagtcgaaacgacaaagggcgaatttgctaatggccattgtgaaccgtaagagcatctgcggttcacaagtgtatgaagttgcagcaggtattccttcggggtgtgctttgactgttctgctcaactccattttcaatgagatgctaattcgttacgtttggaaaatttccgtgggtggagtaccacgcgaaatgttttcaacctatgtaactctgattgtgtatggtgatgataatctcatttctgtgcacccagagttcttgccccacttcaatggtatggttattcaagcgaaattgaaagaagtgggggtaacgattacggacgggagtgacaaaactgctgagggcatttacgaaaagccatttgaaaaattggattttcttaaacgccgctttgctaaacaaagtgatggaaccgtccttgctcccctggatttggcgtcgatatttacttctttacagaatgtgacgctaggtgcaggatctattccagaggctgtgcgtattaacgtacatgtggcactcacagaattgtaccttcaccagaaacgtgagtggtatgatgatctgaggaatcactatcaaaaaacccagggttgggagaacctaccaacctgggcgcagtctcatgctttccacagggaacatcttacgggagccttgccctgggcgccacaccgtgtcatggatatcccagtggataagaagaaattgactcaagctatgcaaagtcaaggtggtcttgattttgtagtacaggtcgcagaacgcatttttgtatgtggtcctgcttttcggcctgatgctacagaacaaggctcatttgttgtgagtcatacaggttcattgccgcgtggtctacagggttgtttgagcccagtcgacttcgtgagtgaagggcaaggtcgtttacctactcagttgtgggtaaataaattcaggtcagagcgtcatcacctcacgtgtctcatcagggatgcgtataacagaggttgtaatgtttattttagggcggagcaaccctacatagtgaactggttgagtgcaactagttttgctatgggacttggaaaagactatagggctatattacatttgtatcataatgtatgtacgcctaatgctcagtgccttgacccctattttgaggcaaggcgcttccagcgggtggacgcttatgttgcaccccctttccatcataggagataa

SEQ ID NO: 571 - DNA, 6684 bp, Strawberry latent ringspot virus
  source 1..6684: mol_type = other DNA
atgggttactcacgaggttcacgtggtggtgctgataagcccaaactgtgtggaatttgttttgctagctttcctgatgctcaggagaggaagtgccactacaggaagtataactgccgggactctggtggtcaacttggtggccttgttagcacagggcgctgtgcttctgctaaagagagaaatttgaaagttgaggctgataggaaggaactggagtcctcctgtgatgatttcctgactgagcaggatatggagatgacatttatgtcagatctctttgagtttactgaagggttctctggagatcccataactctttgttttgcccaccatattacttatggtcctggagattcttatatctcaaggcccatataccaagcacctggcttggatgtagctgactatgccgcattccagaatgagaaagttaagggtactcagcgcgagttccttactactgatcgcaagtatgatgcggaggttctaacttctgtggttagaactgctattgtgggtggtggtttcggatcaccaaccttcgattacactggtctcggtggcgatggactcaagtaccgatttgattctgacgatctctggtcagaccattctaagggccttggtaggtttgtttctgcgggcttcactgaatcgactaagggatcattggatttaaagttaacattgcaggacgttgatgaaatgacccaagctctttctgatgagtgggctgaatgggtttattttgaagaggatctcgaggaatatttggaggagtatctcaactctaaaattgccctcgctcaagagattcgtgctctaaagcagaaaagaactgttgccctagctcagaaagcttatgaccaagctaaggaaaagcctgctgttgagagacccatctccccagatactgttcttcaatctgccaattcctatctgtctggtaccaaatggtgctacgattctgaggatgaggactatctcccagtagctcctcttgataagttccacaataagaaacatgatattgattttgtggattgttgtgacacagagtatcaaattcagccttcaggcacaatctacacagagacttggttcattgatggctgtctccccggatgttggtttaaaagaggagttgctatcgatgaggcagttgtttgtgagaaactccccttaattgggaaaactcctctggagcttatgattcagtatcaggtggagccaacaggtgatcttctcttggacattcaacgtgcattgtttgcatactatgagaaagaagcacttccaaataagaagtatttcaacttgaatggtgtgccaactatgattgttttggaggattggcgttgtgatctaagatactgtctatacgcaccattcatccaaggagatcaacttaagcacttgatggtggttttaaacgctccattaccaggttggttagttgatttcccaaagaggaggaaatctggggttttgcaagcgagtggttggaatccactgcgctatttctcgaagcaggcaactcttggcttcctcgatggagtgatgactaagctgaaggaacttattggtcctataattaatgctgcctcatttgtctgggatttaatcattaaggccaaagattgggcttttaaagcacttgaagatatgattgagaagcgtggtgaaatattaaaggctcttctccagcccctattgtatgtgtgtggtctccttcttttcctgggttctctgaagggcttgaagactattgttgagtcatttggtattccacttgccattttgacgggcgctgcaatcggccttggtgtgtatgttcttgttacattcttggggcaggctcatatgggtgccctcaagaggtcaaccaagatttgggaccttgttcagaattgggataaaccttctgaagttaaatgcattgatgagcaaatcattgaggttttggtggaggaaagtcctgacaaagaggagtgggttcgagagttactagcttcaccgcattatgttcctgaatgtgttattgatcttactcatatgaaggatttactctccccacagaagtgcgctaatttcaagcaagcctttgaggtgggtgcaagtgaggcctcttctcctggaatgctctttggatctggctttatttggaagatcttgctcctcttgtgtcccctttccatgtttggagtttcaaaaactctatcatgtgcgaaggatctgattactattcaagggggccaagatgctgctggacgctttttccaggatattgttggtggcacccaggaggtcttctacacaatcactggtgagaagagtgagtttctggattatatttatgccacagttggtgtggatttccaggcttggcgtgctgaggttctggagctaacaacagcgactcctacctcaatcttcctgggtcctcaagagcgtcttaagagactccgtgcttgcaaggataaggctgatcggctcatccttcagatggactcgcgaaaggttcctggggcttatataacacatttcaatagccttctgcaatccttggatagagctttagtggaatgccaacaagctctttccgttggtaaatggaggaagacgcctgcttgcatttggctttatggtgattctcatgttgggaaatctgtttgctcacagtacttgattgatgatgttctagattctcttgattatgcacagactggtagggttttttcccgtaatggtagtgactctttctggtcctgttacaagaatcagagtgctgttttgtacgatgattttggagctgtctctgagggtggtcattttgatgaagcggagattataagactgatagcccctgctcccttacccctgaatatgccaaatttggaagcaaaggggaatacctgctgtacatcagattttgtgttcattacagccaatcaagctggtttaactccgtctgctgttattcattgtaaaaaagcatttgagaacaggcgattgatcttggccgaggttacagcagtagaaggtggccgctatcgtgacagatacagattcacgattcaccagaagaatgagccatatgctagagatgaccgtttccaggtgatgaattatgaccaattcatgcagtatgtggtaaatcaatcaaaggaccacttctcagagcaagttgatctgcgtgatgctcctcatacacaaatatttgctgcagctgaccagattgctgctgaagctgaggagggtttcaagacggctggtataactattcccttctgtatgcttaaatgtatcgaggggagaatggtgacgtactatgatgaagagaaattcactgaaatgacagtagaattatccgaaactgatgcagatatcatccactcgcgccttgatccacaaatgataacgcagaggcttcagatgcttctacccaaggctgcctatgtcaatttgaagaatcactttggtcttggaacagatccgtttgagcagcccaatccttactttaactgttcgcaacgggcaaaggttattggacgatttttgaagcctaaggtcacggaggcccaactcgaaaccagcaagcgtggttttcttcaggtgactaaggagctagcacaaggagcttgtagagctatatctgatgccccctttctggtaaaacttttactgggatttggtgctttgtactttgtgggtctcccaattttgggttggttaaagagcttgtactctgctccttccttgatgacatttgcagcattgggaactatgagagcctcgggttcgttatcgagttcacaggatcaggaaacaaggcgaacagcctctgggcgtgagagaagacgttacctgttagaggcttcaggtccgggagctctggaagccaagccccaagatgttgaaactgagctggcatcactgtccaagcatttggtcggtttcaccagtatcgactttcctgatcatcattatcgaggaatagcccttggtggtactagggttttaatggtctatcatgtttggctggaactacatagtggttgttacaaagtgggttctctctcgaaaacctttcctttcaccgttaatcgaaagaactgcaaattccagcggataggattgaaggatttggttattgttgactttcctcctacttttgtgtcctttccagttctcaagctggaaaaatggttgcttgcctctcatgatccgttcatggcaggttccgggtggtttatggaaatggttttccaacggaatggagtcttggaagtagctcgagaagaggcggactatactctcctcgatacacatgatgtttacgatgccgcctttcttaagggggttgggctcaacaagtgtgtgaggtacactatctgtgatgatgccggtactggctatcggaatgattttttctatgtttcacagtgtggcacaccccttgttgctaactatggtaaaggaaagggcctaaagatagcttctatccatgtggttcaccacttctcagctactgagaaggatactattatagctggctctggtagcttgctcacaaaagaggaatatctcgaggctagtttgctgctcggggatattaaacaccctcttgagactgaccgtattcaggcatcgggttgcttatctggggatgaattttttgatgctgagacagttttccctgaaggactcctacttccttcccaagcccctcgccaggccacaagtagtgagattcataagagctccatttcggatggtttggaaaagctggttggagagaagaggaaaacagagcctgccatcatcagcaatcgggatactcgccttaaagatcgcaatctggatatcttcaagaagggcatgatgaagtacaaagctgttgctgcagacatgagcccagttacagatgaagaggagaaaatttggaatgtgacttgggatagtatctttgaccttcctggtggcatccagagtaagtgtcatttactctcggaagatgagaatctcaatggagtgaacggagataatgagtaccgtgggatggttgtctcaaccagtgaaggctggccagaagttttgaacaggaaaaatggtgaggcaggaaaggaaagatttcttcttggcctgcctggatgctacacgttgaatcgtaatcttcctatgtaccaaaggatattggatttggatgctctgagtgcaaccacaataccctgtattgttggattggatactgccaaagatgagagactcccactttccaagatataccaagatgttaaaactcgcctctttaccattctcccgatggagtataattacttggtgcgaaagtattttggttcctttgttgcagagctaatgaagttacacaattgcataccaacaaaagtgggaatcaaccctcttggttatgactggacaatccttggaaagaagatgcatgccaaaggaaccaactggttcaatggggattattcccggtttgatggtgtcacaccacggtgccttctgattgaaatttccaatagaatcacaaaactttacggtgatgagcatcgggaaagaaggctccatttgatgttggcagcaacaacgaggcttggtgtggcgggtattggtctttatcgggtctcagggggcattccacccggtttcgcccttacggttatagttaattcattggtcaaccactttttggttagatggagttgggagcacatgatggctagttcctcccttttcttcacagattgtgttgagctcgctgtggttggggatgacaatttagttagtgtgaaacaggttgccgctgaggatttcaacttgaagaaattatctgcatttctggcaggttttggtttcaccctgaaggatggttctgataagaataaggaaatcctacctgagtttaacccaccggagaagtgtgatttcctgaaacgatgtttcaaagctcgaggagatcgttatctggcacctctttcatggctctctctctctgagtcattacactgggttcgtgagacaaatatgacaaatgctgctgcaacccagaataatgtagagggattcctgagagaacttttccactatggtgataaagagctgtattgcaagtggaggagagatcttatctctttatgtgctgagaatagagttccccatccaactagctactcttttgaagagttggagcgttcctggttatccgggaaaactgtggcttctatctttgaaaaggaggagccagagattgtggttctgaaagatgctgcttcggatgttgccccgaatgtacatattgttccagctcagacatgcctcaagtggaaacccaatgaggtgccaactgtggtttggtgtggtcctaactgtccgaatcagcttaggaatgccaatggttgcttccttattcaggcaccacagggctctcgttatcctctccgaagcacagtaagaaattcactgaagagggtacatcagcgttccgatgaggtttattttgctggggctttagaccaatctttagttcattgggttgccgccttttatgcctctatgtatcgtgagtcctttagtcactcaaagtacatggcagcatattttggggataatgataaaggacttctggaggcagtcactgcagctaagggttggtga

SEQ ID NO: 572 - DNA, 1083 bp, Arabidopsis thaliana
  source 1..1083: mol_type = other DNA
atggctactgggcaggttctgtttcagcgattctattgcaagaagtctttggctaaatttgatgtcaagatagttgctgccagctgtgtatggcttgcatcaaaactggaagaaaaccctaaaaaagctagacaggtcatcatcgtattccacaggatggagtgtcgcagggagaacttgccattagaacatctggatatgtatgccaagaagttctctgagttgaaagttgaattaagcagaactgagagacatatactgaaagagatgggttttgtttgtcatgttgaacatcctcacaagttcatatcaaactaccttgccacattagaaacacctccagaattgaggcaagaagcttggaatttggccaatgatagtctgcgtacaaccctctgtgtaaggttcagaagtgaggttgtggcttgtggggtagtgtatgctgctgctcgtaggtttcaagtaccactccctgagaatccgccgtggtggaaagcatttgatgcagataaatctagtattgacgaagtgtgtagagttcttgctcatttatacagtcttccaaaggctcagtatatctctgtttgcaaggatgggaagccatttacattttctagcaggtccgggaattctcaaggtcaatcagcgacaaaggatctgttgccgggagcaggcgaggctgttgatactaaatgtactgcaggatcagctaataacgacttgaaggatggaatggttactacaccacacgaaaaggctacagattccaagaaaagtggtaccgagtcaaactctcagccaattgtaggagactcaagctatgaaagaagtaaagtaggagatagagaaagagagagtgatagagagaaggaacgaggtagagagagggacaggggtaggtctcacagaggcagagattctgacagagacagtgatagggagagagacaaactcaaagatcgaagtcatcatcggtcaagagacagattgaaggattcaggtggacattcagataaatcaaggcatcattcttctcgggaccgtgactaccgcgactcatcgaaagaccgtcgtaggcaccat

SEQ ID NO: 573 - DNA, 2586 bp, Solanum lycopersicum
  source 1..2586: mol_type = other DNA
atggctgaaattcttcttacatcagtaatcaataaatctgtagaaatagctggaaatttactgattcaagaaggaaagcgtttatattggttgaaagaggatatcgattggctccagagagaaatgagacacattcgatcttatgttgacaacgcaaaggccaaggaagctggaggtgattcaagggtcaaaaacttattgaaagatattcaagaattggcaggtgatgtggaggatctcttagatgacttccttccaaaaattcaacaatccaataagttcaattattgccttaagaggagttcttttgcagatgagtttgctatggagattgagaagataaagagaagggttgttgacattgaccgaataaggaaaacttacaacatcatagatacagataacaataatgatgattgtgttctgctggatcggagaagattattcctacatgctgatgaaacagagatcatcggtttggatgatgacttcaatatgctacaagccaaattacttaatcaagatttgcattatggagttgtttccatagttggcatgcccggtctggggaaaacaactcttgccaagaaactttataggctcattcgtgatcaatttgagtgttctggactggtctacgtttcacaacagccaagagcgagtgaaatcttacttgacattgccaaacaaattggactgacggaacagaaaatgaaggaaaatttggaggacaacctgcgatcactcttgaaaataaaaaggtatgttatcctcctagatgacatttgggatgtggaaatttgggatgatctgaaacttgtccttcctgaatgtgattcaaaagtcggcagtagaatgataatcacgtctcgaaatagtaatgtaggcagatacataggaggggaatcctccctccatgcattgcaacccctagaatccgagaaaagctttgaactctttaccaagaaaatctttaattttgatgataataatagttgggccaatgcttcacctgacttggtgaatattggtagaaatatagttgggagatgtggaggtataccgctagccatagtggtgactgcaggcatgttaagggcaagagaaagaacagaacatgcgtggaacagagtacttgagagtatgggccataaagttcaagatggatgtgctaaggtattggctctcagttacaatgatttacctattgcctcaaggccatgtttcttgtactttggcctttaccccgaggaccatgaaattcgtgcttttgatttgataaatatgtggattgctgagaagtttatagtagtaaatagtggtaataggcgagaggctgaggatttggcggaggacgtcctaaatgatttggtttctagaaacttgattcaacttgccaaaaggacatataatggaagaatttcaagttgtcgcatacatgacttgttacatagtttgtgtgtggacttggctaaggaaagtaacttctttcacaccgcgcatgatgcatttggtgatcccggcaatgttgctaggctccgaaggattacattctactctgacaatgtcatgattgagttcttccgttcaaatcctaagcttgagaagcttcgtgtacttttctgtttcgcaaaagacccttccatattttctcatatggcttattttgacttcaaattgttgcacacattggttgtagtcatgtctcaaagttttcaagcatatgtcactatcccaagcaaatttgggaacatgacttgcttacgctatctgagattggaggggaatatttgtggaaaactgccaaatagtattgtcaagctcacacgtctagagaccatagacattgatcgacgtagcctcattcaacctccttctggtgtttgggagtctaaacatttgagacatctttgttatagagattatggacaagcatgtaacagttgcttttctataagctcattttacccaaatatttactcattgcatcctaacaatctacaaaccttgatgtggatacctgataaattttttgaaccgaggttgttgcaccgattgatcaatttaagaaaactgggtatactgggagtgtccaattctaccgttaagatgttatcaatatttagccctgtgcttaaggcgctggaggttctgaagctcagtttttccagtgacccgagtgaacaaataaagttgtcatcgtatccacatattgctaagttgcatttgaatgttaacagaacaatggccttgaactctcaatcatttcctccaaatctcatcaagcttactctagcctactttagtgtagaccgttatatactggcagtacttaagacatttcccaaattaagaaaacttaaaatgttcatctgcaagtataatgaagaaaagatggatctctcgggcgaggcaaatggttatagctttccgcaacttgaagttttgcatattcatagcccgaatgggttgtctgaagtaacgtgcacggatgatgtcagtatgcccaaattgaaaaagctgttacttacaggattccattgccgaatcagtttatcggaacggcttaaaaagctgagtaaatga

SEQ ID NO: 574 - DNA, 3156 bp, Solanum tuberosum
  source 1..3156: mol_type = other DNA
atggcttatgctgctgttacttcccttatgagaaccatacatcaatcaatggaacttactggatgtgatttgcaaccgttttatgaaaagctcaaatctttgagagctattctggagaaatcctgcaatataatgggcgatcatgaggggttaacaatcttggaagttgaaatcgtagaggtagcatacacaacagaagatatggttgactcggaatcaagaaatgtttttttagcacagaatttggaggaaagaagcagggctatgtgggagatttttttcgtcctggaacaagcactagaatgcattgattccaccgtgaaacagtggatggcaacatcggacagcatgaaagatctaaaaccacaaactagctcgcttgtcagtttacctgaacatgatgttgagcagcccgagaatataatggttggccgtgaaaatgaatttgagatgatgctggatcaacttgctagaggaggaagggaactagaagttgtctcaatcgtagggatgggaggcatcgggaaaacaactttggctacaaaactctatagtgatccgtgcattatgtctcgatttgatattcgtgcaaaagcaactgtttcacaagagtattgtgtgagaaatgtactcctaggccttctttctttgacaagtgatgaacctgatgatcagctagcggaccgactgcaaaagcatctgaaaggcaggagatacttggtagtcattgatgacatatggactacagaagcttgggatgatataaaactatgtttcccagactgttataatggaagcagaatactcctgactactcggaatgtggaagtggctgaatatgctagttcaggtaagcctcctcatcacatgcgcctcatgaattttgacgaaagttggaatttactacacaaaaagatctttgaaaaagaaggttcttattctcctgaatttgaaaatattgggaaacaaattgcattaaaatgtggaggattacctctagcaattactgtgattgctggacttctctccaaaatgggtcaaagattagatgagtggcaaagaattggggaaaatgtaagttcggtcgttagcacagatcctgaagcacaatgcatgagagtgttggctttgagttaccatcacttgccttctcacctaaaaccgtgttttctgtattttgcaattttcacagaggatgaacagatttctgtaaatgaacttgttgagttatggcctgtagagggatttttgaatgaagaagagggaaaaagcatagaagaggtggcaacaacatgtataaacgaacttatagatagaagcttaattttcatccacaattttagttttcgtggaacaatagaaagttgtggaatgcatgatgtgacccgtgaactctgtttgagggaagctcgaaacatgaattttgtgaatgttatcagaggaaagagtgatcaaaattcatgtgcacaatccatgcagcgttcctttaagagtcgaagtcggatcagaatccataaggtggaagaattggcttggtgtcgtaacagtgaggctcattctattatcatgttgggtggattcgaatgcgtcacactggaattgtctttcaagctagtaagagtactagatcttggtttgaatacatggccaatttttcccagtggagtactttctctaattcatttgagatacctatctttgcgttttaatccttgcttacagcagtatcaaggatcgaaagaagctgttccctcatcaataatagacattcctctatcgatatcaagcctatgctatctgcaaacttttaaacttaaccttccatttcccagttattatcctttcatattaccatcggaaattttgacgatgccacaattgaggacgctgtgtatgggctggaattacttgcggagtcatgagcctacagagaacagattggttttgaaaaatttgcaatgcctcaatcaattgaaccctcggtattgtacagggtctttttttagactatttcccaatttaaagaagttgcaagtatttggcgtcccagaagactttcgcaatagccaggacctgtatgattttcgctacttatatcagctcgaagaattgacatttcgtttatattatccatatgctgcttgctttctaaaaaacactgcaccttcaggttctacgcaagatcctctgaggtttcagacggaaatattgcacaaagagattgatttcgggggaactgcacctccaactttactcttacctcctccggatgcttttccacaaaaccttaagagtttaacttttaggggagaattctctgtggcatggaaggatttgagcattgttggtaaattacccaaactcgaggtccttatactatcatggaatgccttcataggcaaggagtgggaagtagttgaggaagggtttcctcacttgaagttcttgtttctggatgatgtatacattcgatactggagagctagtagtgatcactttccgtaccttgaacgagttattcttagagattgccgtaatttggattcaatccctcgagattttgcagatataaccacactagctcttattgatatagattactgtcaacaatctgttgtgaattccgccaagcaaattcaacaggacattcaagacaactatggaagctctatcgaggtccatactcgtcatcttttgtaagacatcttcttccttgctttacaacaataattaactcatcatcatagtaaactcgataataatctggataatagccttagtaagtcaaattgcaccaattcaacaaaagttcttgatgctgtcattgtgtttgatttgaatccttccaatattgtgtaacttgttatacttgcatgttcattcttgattttgggaagtgtaacatttcatttttcatcttttgtggctagcattcccaagagtgtgacaacagttgaagatgatgatgatagtgtgacaacagatgaagatgatgatgatgatgactttgagaaagaagttgcttcttgccgcaataatgtgtaagttcttatacctgcatgctcattcttgctataatgttctcttgttccttaattatgggacatctgacatattattttccatgttttgcgtcttttatttttctgcagcgag

SEQ ID NO: 575 - DNA, 480 bp, Tobacco mosaic virus
  source 1..480: mol_type = other DNA
atgtcttacagtatcactactccatctcagttcgtgttcttgtcatcagcgtgggccgacccaatagagttaattaatttatgtactaatgccttaggaaatcagtttcaaacacaacaagctcgaactgtcgttcaaagacaattcagtgaggtgtggaaaccttcaccacaagtaactgttaggttccctgacagtgactttaaggtgtacaggtacaatgcggtattagacccgctagtcacagcactgttaggtgcattcgacactagaaatagaataatagaagttgaaaatcaggcgaaccccacgactgccgaaacgttagatgctactcgtagagtagacgacgcaacggtggccataaggagcgcgataaataatttaatagtagaattgatcagaggaaccggatcttataatcggagctctttcgagagctcttctggtttggtttggacctctggtcctgcaacttga

SEQ ID NO: 576 - DNA, 795 bp, Soybean mosaic virus
  source 1..795: mol_type = other DNA
tcaggcaaggagaaggaaggagacatggatgcaggtaaggatccaaagaagaataccagcagtagcaaaggagctggtacaagcagcaaagatgtaaatgttggatcaaaaggaaaggtggttccgcgtttgcagaagattacaaggaagatgaatcttccaatggttgaagggaagatcattcttagcttggaccacttgcttgagtacaaacctaatcaggttgatttattcaatactcgagcaacaagaacacagtttgaagcgtggtacaatgcagttaaagatgaatatgagcttgatgatgagcagatgggtgtggtcatgaatggtttcatggtttggtgtattgacaatggcacttctccagatgccaatggcgtgtgggtgatgatggatggagaggaacagattgaatatccgctgaagccaattgtcgaaaatgcaaaaccaactttgagacaaatcatgcatcatttttcagatgcagcagaagcttacattgagatgagaaattctgaaagtccgtatatgcctagatatggactgttaaggaatttgagagatagagagctagcccgctatgcttttgacttctatgaggtcacttctaaaacaccaaacagggcaagggaagcaatagcgcaaatgaaggctgcagctctctcgggagttaacaacaagttgtttggacttgatggaaatatctcaaccaactccgaaaatactgaaaggcacactgcaagggatgtgaatcaaaacatgcacactcttctgggcatgggcccaccgcag

SEQ ID NO: 577 - DNA, 654 bp, Cucumber mosaic virus
  source 1..654: mol_type = other DNA
atggacaaatctgaatcaaccagtgccggtcgtaatcgtcgacgtcgtctgcgtcgcggttcccgctccgcctcctcctccgcggatgctacatttagagtcctgtcgcaacagctttcgcgacttaataagacgttagcagctggtcgtcctactattaaccacccaacctttgtgggtagtgagcgttgtaaacctggatacacgttcacctcgattaccctgaagccaccgaaaatagacaaggggtcttattatggcaaaaggttgttacttcctgattcagtcactgagttcgataagaagcttgtttcgcgcattcaaattcgagttaatcctttgccgaaatttgattctaccgtgtgggtgacggtccgtaaagttcctgcctcctcggacctgtctgtatccgccatctctgctatgtttgcggacggagcctcaccggtactggtttatcagtatgctgcatctggcgttcaagccaataacaaattgttatatgatctttcagtgatgcgcgctgatattggtgacatgagaaagtacgccgtgctcgtgtattcaaaagacgatgcgcttgagacggacgaactagtacttcatatcgacatcgagcaccaacgcattcccacgtctggggtgctcccagtt

SEQ ID NO: 578 - DNA, 708 bp, Potato virus X
  source 1..708: mol_type = other DNA
atgactacaccagccaacaccactcaagctgtaggatccaccaaatcaactaccaccaccactgcaggcgcaactcctgccaattcagggctattcaccataccagatggggacttcttcagcaccgcaaaggctgtggtcgctagcaatgccgtggccaccaacgaggatctcgccaaaatacaggaaatctggaaggacaagaaaattccttcagacactatggctcaggcagcttgggacttagtgagacactgtgccgacgtcgggtcctctgcccaaactgaaatgataggcaccggtccatactccaatggggtcagccgggctagactggcagctgcaattaaagaggtgtgcacactgaggcagttctgcaaaaagtatgcccccgtggtctggaactggatgctcacaaacaacagcccaccggccaactggcaggcacaaggcttcaagccggagcacaaattcgcagcctttgacttctttgatggagtcactaatcccgcagctatcactcccaaagaggggctcatgagacctccgtctgaagcagaaatgaatgccgcccaaactgctgcctttgtgaagatcaccaaggcgagggcgcaatccaacgactttgccagtctggatgccgcggtcactaggggccgcatcacaggaacgactgttgcagaagcagttgtttcactacccccacca

SEQ ID NO: 579 - DNA, 774 bp, Tomato spotted wilt virus
  source 1..774: mol_type = other DNA
atgtctaaggttaagctcactaaggaaagcattgttgctttgttgacacaaggcaaagaccttgagtttgaggaagatcagaatctggtagcattcaacttcaagactttttgtctggaaaacatcgaccagatcaagaagatgagcgttatttcatgtctgacattcctaaagaatcgtcagagcataatgaaggttattaagcaaagcgattttacttttggtaaaattaccataaagaaaacttcagacaggattggaggcactgacatgaccttcagaaggcttgatagcttgatcagggtcaggcttgttgaagaaactgggaattctgagaatctcaatactatcaaatctaagattgcttcccatcctttgattcaagcctatggattacctctcgatgatgcaaagtctgtgagacttgccataatgctgggaggtagcttacctcttattgcttcagttgatagctttgagatgatcagtgttgtcttggctatatatcaggatgcaaaatacaaggacctcgggatcgacccaaagaagtatgacaccaaggaagccttaggaaaagtttgcactgtgctgaaaagcaaagcatttgaaatgaatgaagatcaggtgaagaaggggaaagagtatgctgctatacttagctccagcaatcctaatgctaaagggagtgttgctatggaacattacagtgaaactcttaacaagttctatgaaatgttcggggttaaaaagcaggcaaaactcgcagaacttgct

SEQ ID NO: 580 - DNA, 777 bp, Glycine max
  source 1..777: mol_type = other DNA
atgagtggtagcaacgatggtagcggcagctggagctctaggtttttgaaggtggctagtgcagctgccgctacagccgccgttgccggcggtttatatgccattctttcatcctcaacctctgctagctctgagatggaagtgccgtttggcagcgcacggcctgagagcaacactaagcgacaacaagagtcattctatgagcacgaagaaactgaggatgacgaagaatctgaggaggcagacaatgggaaatggaagaaacctgagagtggttgggtgaagctgaatgtggatggttcacgtattcatgaagaacccgcctctgcgggttgtggtggggttataagggacgaatggggaacatggtgcgtgggctttgatcagaaattggaccccaacatttgtcgacaagcccattatacagagttacaagctattctaacgggcctgaaggtggctcgggaggacatgatcaatgtggaaaaactggttgtggagtcagacagtgagcccgcggtgaacatggtgaagagtgggcttgggtacaagtatcatcgtccagagtataaggttgttcaagacataaataggcttcttaaagatcctaagtggctagcgaggttggattatgttcctaggaaagctaatcgagtcgctaattacctcgccaagcgtgtttgtaaaccgtcttctcctcatgatcatcatcatttcagcaagtatccttgtcccccggattacgattgtgaaaagattttcttggaggataacaat

SEQ ID NO: 581 - protein, 361 aa, Arabidopsis thaliana
MATGQVLFQRFYCKKSLAKFDVKIVAASCVWLASKLEENPKKARQVIIVFHRMECRRENLPLEHLDMYAKKFSELKVELSRTERHILKEMGFVCHVEHPHKFISNYLATLETPPELRQEAWNLANDSLRTTLCVRFRSEVVACGVVYAAARRFQVPLPENPPWWKAFDADKSSIDEVCRVLAHLYSLPKAQYISVCKDGKPFTFSSRSGNSQGQSATKDLLPGAGEAVDTKCTAGSANNDLKDGMVTTPHEKATDSKKSGTESNSQPIVGDSSYERSKVGDRERESDREKERGRERDRGRSHRGRDSDRDSDRERDKLKDRSHHRSRDRLKDSGGHSDKSRHHSSRDRDYRDSSKDRRRHH

SEQ ID NO: 582 - protein, 1246 aa, Solanum peruvianum
MAENEIEEMLEHLRRIKSGGDLDWLDILRIEELEMVLRVFRTFTKYNDVLLPDSLVELTKRAKLIGEILHRLFGRIPHKCKTNLNLERLESHLLEFFQGNTASLSHNYELNNFDLSKYMDCLENFLNDVLMMFLQKDRFFHSREQLAKHRSIKELKIVQKKIRFLKYIYAPEINGYVDYEKQECLENRIQFMTNTVGQYCLAVLDYVTEGKLNEENDNFSKPPYLLSLIVLVELEMKKIFHGEVKASKFTQSKTFKDKKLPKGFSHHLHNLLMYLRNKKLENFPNNIAAQNIDVAIEFLLVFLDADVSNHVINGNWLKEVLLKVGAIAGDILYVIQKLLPRSINKDETSNISLCSIQILEKTKDLKAQVETYYKSLKFTPSQFPTFGGLSFLNSLLRKLNEMSTSKSGLGFLMKPLLGNLEKELSSLTSILEKELSSIFRDVVHHEHNIPKDLQRRTINLSYEAEVAIDSILAQYNAFLHIFCSLPTIVKEIKQINAEVTEMWSADIPLNPHYVAAPLKHLPDRHSNLVTDEEVVGFENKAEELIDYLIRGTNELDVVPIVGMGGQGKTTIARKLYNNDIIVSRFDVRAWCIISQTYNRRELLQDIFSQVTGSDDNGATVDVLADMLRRKLMGKRYLIVLDDMWDCMVWDDLRLSFPDDGIRSRIVVTTRLEEVGKQVKYHTDPYSLPFLTTEESCQLLQKKVFQKEDCPPELQDVSQAVAEKCKGLPLVVVLVAGIIKKRKMEESWWNEVKDALFDYLDSEFEEYSLATMQLSFDNLPHCLKPCLLYMGMFSEDARIPASTLISLWIAEGFVENTESGRLMEEEAEGYLMDLISSNLVMLSKRTYKGRVKYCQVHDVVHHFCLEKSREAKFMLAVKGQYIHFQPSDWKGTRVSFSFSEELSKFASLVSKTQKPFHQHLRSLITTNRAKSINDIFSCQISELRLLKVLDLSSYIVEFLSLATFKPLNQLKYLAVQAFEFYFDPGSHLPHIETFIVMNLPYYDILLPVSFWEMKKLRHAHFGKAEFDKQGLSEGSSKLENLRILKNIVGFDRVDVLSRRCPNLQQLQITYFGNNEEPFCPKLENLTQLQQLQLSFARPRTLSGLQLPSNLNKLVLEGIHIGCVIPFIAGLPSLEYLQLHDVCFPQSEEWCLGDITFHKLKLLKLVKLNISRWDVSEESFPLLETLVIKKCIDLEEIPLSFADIPTLEQIKLIGSWKVSLEDSAVRMKEEIKDTEGCDRLHLVKQRSD

SEQ ID NO: 583 - protein, 861 aa, Solanum lycopersicum
MAEILLTSVINKSVEIAGNLLIQEGKRLYWLKEDIDWLQREMRHIRSYVDNAKAKEAGGDSRVKNLLKDIQELAGDVEDLLDDFLPKIQQSNKFNYCLKRSSFADEFAMEIEKIKRRVVDIDRIRKTYNIIDTDNNNDDCVLLDRRRLFLHADETEIIGLDDDFNMLQAKLLNQDLHYGVVSIVGMPGLGKTTLAKKLYRLIRDQFECSGLVYVSQQPRASEILLDIAKQIGLTEQKMKENLEDNLRSLLKIKRYVILLDDIWDVEIWDDLKLVLPECDSKVGSRMIITSRNSNVGRYIGGESSLHALQPLESEKSFELFTKKIFNFDDNNSWANASPDLVNIGRNIVGRCGGIPLAIVVTAGMLRARERTEHAWNRVLESMGHKVQDGCAKVLALSYNDLPIASRPCFLYFGLYPEDHEIRAFDLINMWIAEKFIVVNSGNRREAEDLAEDVLNDLVSRNLIQLAKRTYNGRISSCRIHDLLHSLCVDLAKESNFFHTAHDAFGDPGNVARLRRITFYSDNVMIEFFRSNPKLEKLRVLFCFAKDPSIFSHMAYFDFKLLHTLVVVMSQSFQAYVTIPSKFGNMTCLRYLRLEGNICGKLPNSIVKLTRLETIDIDRRSLIQPPSGVWESKHLRHLCYRDYGQACNSCFSISSFYPNIYSLHPNNLQTLMWIPDKFFEPRLLHRLINLRKLGILGVSNSTVKMLSIFSPVLKALEVLKLSFSSDPSEQIKLSSYPHIAKLHLNVNRTMALNSQSFPPNLIKLTLAYFSVDRYILAVLKTFPKLRKLKMFICKYNEEKMDLSGEANGYSFPQLEVLHIHSPNGLSEVTCTDDVSMPKLKKLLLTGFHCRISLSERLKKLSK

SEQ ID NO: 584 - protein, 937 aa, Solanum tuberosum
MAYAAVTSLMRTIHQSMELTGCDLQPFYEKLKSLRAILEKSCNIMGDHEGLTILEVEIVEVAYTTEDMVDSESRNVFLAQNLEERSRAMWEIFFVLEQALECIDSTVKQWMATSDSMKDLKPQTSSLVSLPEHDVEQPENIMVGRENEFEMMLDQLARGGRELEVVSIVGMGGIGKTTLATKLYSDPCIMSRFDIRAKATVSQEYCVRNVLLGLLSLTSDEPDDQLADRLQKHLKGRRYLVVIDDIWTTEAWDDIKLCFPDCYNGSRILLTTRNVEVAEYASSGKPPHHMRLMNFDESWNLLHKKIFEKEGSYSPEFENIGKQIALKCGGLPLAITVIAGLLSKMGQRLDEWQRIGENVSSVVSTDPEAQCMRVLALSYHHLPSHLKPCFLYFAIFTEDEQISVNELVELWPVEGFLNEEEGKSIEEVATTCINELIDRSLIFIHNFSFRGTIESCGMHDVTRELCLREARNMNFVNVIRGKSDQNSCAQSMQRSFKSRSRIRIHKVEELAWCRNSEAHSIIMLGGFECVTLELSFKLVRVLDLGLNTWPIFPSGVLSLIHLRYLSLRFNPCLQQYQGSKEAVPSSIIDIPLSISSLCYLQTFKLNLPFPSYYPFILPSEILTMPQLRTLCMGWNYLRSHEPTENRLVLKNLQCLNQLNPRYCTGSFFRLFPNLKKLQVFGVPEDFRNSQDLYDFRYLYQLEELTFRLYYPYAACFLKNTAPSGSTQDPLRFQTEILHKEIDFGGTAPPTLLLPPPDAFPQNLKSLTFRGEFSVAWKDLSIVGKLPKLEVLILSWNAFIGKEWEVVEEGFPHLKFLFLDDVYIRYWRASSDHFPYLERVILRDCRNLDSIPRDFADITTLALIDIDYCQQSVVNSAKQIQQDIQDNYGSSIEVHTRHLFIPKSVTTVEDDDDSVTTDEDDDDDDFEKEVASCRNNVE

SEQ ID NO: 585 - protein, 159 aa, Tobacco mosaic virus; identical to SEQ ID NO: 26

SEQ ID NO: 586 - protein, 265 aa, Soybean mosaic virus
SGKEKEGDMDAGKDPKKNTSSSKGAGTSSKDVNVGSKGKVVPRLQKITRKMNLPMVEGKIILSLDHLLEYKPNQVDLFNTRATRTQFEAWYNAVKDEYELDDEQMGVVMNGFMVWCIDNGTSPDANGVWVMMDGEEQIEYPLKPIVENAKPTLRQIMHHFSDAAEAYIEMRNSESPYMPRYGLLRNLRDRELARYAFDFYEVTSKTPNRAREAIAQMKAAALSGVNNKLFGLDGNISTNSENTERHTARDVNQNMHTLLGMGPPQ

SEQ ID NO: 587 - protein, 218 aa, Cucumber mosaic virus
MDKSESTSAGRNRRRRLRRGSRSASSSADATFRVLSQQLSRLNKTLAAGRPTINHPTFVGSERCKPGYTFTSITLKPPKIDKGSYYGKRLLLPDSVTEFDKKLVSRIQIRVNPLPKFDSTVWVTVRKVPASSDLSVSAISAMFADGASPVLVYQYAASGVQANNKLLYDLSVMRADIGDMRKYAVLVYSKDDALETDELVLHIDIEHQRIPTSGVLPV

SEQ ID NO: 588 - protein, 236 aa, Potato virus X
MTTPANTTQAVGSTKSTTTTTAGATPANSGLFTIPDGDFFSTAKAVVASNAVATNEDLAKIQEIWKDKKIPSDTMAQAAWDLVRHCADVGSSAQTEMIGTGPYSNGVSRARLAAAIKEVCTLRQFCKKYAPVVWNWMLTNNSPPANWQAQGFKPEHKFAAFDFFDGVTNPAAITPKEGLMRPPSEAEMNAAQTAAFVKITKARAQSNDFASLDAAVTRGRITGTTVAEAVVSLPPP

SEQ ID NO: 589 - protein, 258 aa, Tomato spotted wilt virus
MSKVKLTKESIVALLTQGKDLEFEEDQNLVAFNFKTFCLENIDQIKKMSVISCLTFLKNRQSIMKVIKQSDFTFGKITIKKTSDRIGGTDMTFRRLDSLIRVRLVEETGNSENLNTIKSKIASHPLIQAYGLPLDDAKSVRLAIMLGGSLPLIASVDSFEMISVVLAIYQDAKYKDLGIDPKKYDTKEALGKVCTVLKSKAFEMNEDQVKKGKEYAAILSSSNPNAKGSVAMEHYSETLNKFYEMFGVKKQAKLAELA

SEQ ID NO: 590 - protein, 259 aa, Glycine max
MSGSNDGSGSWSSRFLKVASAAAATAAVAGGLYAILSSSTSASSEMEVPFGSARPESNTKRQQESFYEHEETEDDEESEEADNGKWKKPESGWVKLNVDGSRIHEEPASAGCGGVIRDEWGTWCVGFDQKLDPNICRQAHYTELQAILTGLKVAREDMINVEKLVVESDSEPAVNMVKSGLGYKYHRPEYKVVQDINRLLKDPKWLARLDYVPRKANRVANYLAKRVCKPSSPHDHHHFSKYPCPPDYDCEKIFLEDNN

SEQ ID NO: 591 - DNA, 3774 bp, Solanum lycopersicum
  source 1..3774: mol_type = other DNA
atggaaaaacgaaaagatattgaagaagcaaacaactcattggtgttattttctgctcttagcaaggacattgccaatgttctaattttcctagagaatgaggaaaatcaaaaagctcttgacaaagatcaagttgaaaagctaaaattgaaaatggcatttatttgtacatatgttcagctttcttattccgattttgagcagtttgaagatataatgactagaaatagacaagaggttgagaatctgcttcaatcacttttggatgatgatgtccttactagcctcaccagtaatatggatgactgtatcagcttgtatcatcgttcttataaatcagatgccatcatgatggatgagcaattggacttcctcctcttgaatctgtatcatctatccaagcatcacgctgaaaagatatttcctggagtgactcaatatgaagttcttcagaatgtatgtggcaacataagagatttccatgggttgatactgaatggttgcattaagcatgagatggttgagaatgtcttacctctgtttcaactcatggctgaaagagtaggacacttcctttgggaggatcagactgatgaagactctcggctctccgagctagatgaggatgaacacaatgatagagactctcgactcttccagctaacacatctactcttgaagattgttccaactgaactggaggttatgcacatatgttatacaaatttgaaagcttcaacttcagcagaagttggacgcttcattaagaagctcctggaaacctcaccggatattctcagagaatatatcattcaactacaagagcatatgttaactgttattccccctagcactttaggggctcgaaacattcatgtcatgatggaattcctattacttattctttctgatatgcccaaggactttattcatcatgacaaactttttgatctcttggctcatgttggaacacttaccagggaggtatcgactcttgtacgtgacttggaagagaaattaaggaataaagagggtaataaccaaacaaattgtgcaaccctagacttgctggaaaatattgaactcctcaagaaagatctcaaacatgtttatctgaaagccccaaattcatctcaatgttgcttccccatgagtgatggaccactcttcatgcatcttctacacatgcacttaaatgatttgctagattctaatgcttattcaatttctttgataaaggaagaaatcgagttggtgagtcaagaactggaattcataagatcattctttggggatgctgctgagcaaggattgtataaagatatctgggcacgtgttctagatgtggcttatgaggcaaaagatgtcatagattcaattattgttcgagataatggtctcttacatcttattttctcacttcccattaccataaagaagatcaaacttatcaaagaagagatctctgctttagatgagaacattcccaaggacagaggtctaatcgttgtgaactctcccaagaaaccagttgagagaaagtcattgacaactgataaaataattgtaggttttgaggaggagacaaacttgatacttagaaagctcaccagtggacccgcagatttagatgtcatttcgatcaccggtatgccgggttcaggtaaaactactttggcatacaaagtatacaatgataagtcagtttctagacattttgaccttcgtgcatggtgcacggtcgatcaaggatatgacgacaagaagttgttggatacaattttcagtcaagttagtggctcagattcaaatttgagtgagaatattgatgttgctgataaattgcggaaacaactgtttggaaagaggtatcttattgtcttagatgatgtgtgggatactactacattggatgagttgacaagaccttttcctgaagctaagaaaggaagtaggattattttgacaactcgagaaaaggaagtggctttgcatggaaagctgaacactgatcctcttgaccttcgattgctaagaccagatgaaagttgggaacttttagataaaaggacatttggtaatgagagttgccctgatgaactattagatgtcggtaaagaaatagccgaaaattgtaaagggcttcctttggtggctgatctgattgctggagtcattgctgggagggaaaagaaaaggagtgtgtggcttgaagttcaaagtagtttgagttcttttattttgaacagtgaagtggaagtgatgaaagttatagaattaagttatgaccatttaccacatcacctcaagccatgcttgcttcactttgcaagttggccgaaggacactcctttgacaatctatttgtttactgtttatttgggtgctgaaggatttgtggaaaagacggagatgaagggtatagaagaagtggtgaagatttatatggatgatttaatttccagtagcttggtaatttgtttcaatgagataggtgatatactgaatttccaaattcatgatcttgtgcatgacttttgtttgataaaagcaagaaaggaaaatttgtttgatcggataagatcaagtgctccatcagatttgttgcctcgtcaaattaccattgattatgatgaggaggaggagcactttgggcttaattttgtcatgttcgattcaaataagaaaaggcattctggtaaacacctctattctttgaggataaatggagaccagctggatgacagtgtttctgatgcatttcacctaagacacttgaggcttattagagtgttggacctggaaccctctttaatcatggtgaatgattctttgctgaatgaaatatgcatgttgaatcatttgaggtacttaagaattcggacacaagttaaatatctgcctttctctttctcaaacctctggaatctagaaagtctgtttgtgtctaacaaaggatcaatcttggtactattaccgagaattttggatcttgtaaagttgcgagtgctgtccgtgggtgcttgttctttctttgatatggatgcagatgaatcaatattgatagcaaaggacacaaagttagagaacttgagaatattaggggaactgttgatttcctattcgaaagatacaatgaatattttcaaaaggtttcccaatcttcaggtgcttcagtttgaactcaaggagtcatgggattattcaacagagcaacattggttcccgaaattggattgcctaactgaactagaaacactctgtgtaggttttaaaagttcaaacacaaaccactgtgggtcctctgttgtgacaaatcggccgtgggattttcacttcccttcaaatttgaaagaactgttgttgtatgactttcctctgacatccgattcactatcaacaatagcgagactgcccaaccttgaaaatttgtccctttatgatacaatcatccagggagaagaatggaacatgggggaggaagacacttttgagaatctcaaatttttgaacttgcgtctactgactctttccaagtgggaggttggagaggaatccttccccaatcttgagaaattaaaactgcaggaatgtggtaagcttgaggagattccacctagttttggagatatttattcattgaaatttatcaaaattgtaaagagtcctcaacttgaagattctgctctcaagattaagaaatacgctgaagatatgagaggagggaacgatcttcagatccttggccagaagaatatccccttatttaagtag

SEQ ID NO: 592 - DNA, 2739 bp, Glycine max
  source 1..2739: mol_type = other DNA
atggcttatgctgctgttacttcccttatgagaaccatacatcaatcaatggaacttactggatgtgatttgcaaccgttttatgaaaagctcaaatctttgagagctattctggagaaatcctgcaatataatgggcgatcatgaggggttaacaatcttggaagttgaaatcatagaggtagcatacacaacagaagatatggttgactcggaatcaagaaatgtttttttagcacggaatgtggggaaaagaagcagggctatgtgggggatttttttcgtcttggaacaagcactagaatgcattgattccaccgtgaaacagtggatggcaacatcggacagcatgaaagatctaaaaccacaaactagctcacttgtcagtttacctgaacatgatgttgagcagcccgagaatataatggttggccgtgaaaatgaatttgagatgatgctggatcaacttgctagaggaggaagggaactagaagttgtctcaatcgtagggatgggaggcatcgggaaaacaactttggctgcaaaactctatagtgatccttacattatgtctcgatttgatattcgtgcaaaagcaactgtttcacaagagtattgtgtgagaaatgtactcctaggccttctttctttgacaagtgatgaacctgattatcagctagcggaccaactgcaaaagcatctgaaaggcaggagatacttggtagtcattgatgacatatggactacagaagcttgggatgatataaaactatgtttcccagactgcgataatggaagcagaatactcctgactactcggaatgtggaagtggctgaatatgctagctcaggtaagcctcctcatcacatgcgcctcatgaattttgacgaaagttggaatttactacacaaaaagatctttgaaaaagaaggttcttattctcctgaatttgaaaatattgggaaacaaattgcattaaaatgtggagggttacctctagcaattactttgattgctggacttctctccaaaatcagtaaaacattggatgagtggcaaaatgttgcggagaatgtacgttcggtggtaagcacagatcttgaagcaaaatgcatgagagtgttggctttgagttaccatcacttgccttctcacctaaaaccgtgttttctgtattttgcaattttcgcagaggatgaacggatttatgtaaataaacttgttgagttatgggccgtagaggggtttttgaatgaagaagagggaaaaagcatagaagaggtggcagaaacatgtataaacgaacttgtagatagaagtctaatttctatccacaatgtgagttttgatggggaaacacagagatgtggaatgcatgatgtgacccgtgaactctgtttgagggaagctcgaaacatgaattttgtgaatgttatcagaggaaagagtgatcaaaattcatgtgcacaatccatgcagtgttcctttaagagtcgaagtcggatcagtatccataatgaggaagaattggtttggtgtcgtaacagcgaggctcattctatcatcacgttgtgtatattcaaatgcgtcacactggaattgtctttcaagctagtaagagtactagatcttggtttgactacatgcccaatttttcccagtggagtactttctctaattcatttgagatacctatctttgcgttttaatcctcgcttacagcagtatcgaggatcgaaagaagctgttccctcatcaataatagacattcctctatcgatatcaagcctatgctatctgcaaacttttaaactttaccatccatttcccaattgttatcctttcatattaccatcggaaattttgacaatgccacaattgaggaagctgtgtatgggctggaattacttgcggagtcatgagcctacagagaacagattggttttgaaaagtttgcaatgcctcaatgaattgaatcctcggtattgtacagggtcttttttaagactatttcccaatttaaagaagttggaagtatttggcgtcaaagaggactttcgcaatcacaaggacctgtatgattttcgctacttatatcagctcgagaaattggcatttagtacttattattcatcttctgcttgctttctaaaaaacactgcacctttaggttctactccgcaagatcctctgaggtttcagatggaaacattgcacttagagactcattccagggcaactgcacctccaactgatgttccaactttcctcttacctcctccggattgttttccacaaaaccttaagagtttaacttttagcggagatttctttttggcatggaaggatttgagcattgttggtaaattacccaaactcgaggtccttcaactatcacacaatgccttcaaaggcgaggagtgggaagtagttgaggaagggtttcctcacttgaagttcttgtttctggatagcatatacattcggtactggagagctagtagtgatcactttccataccttgaacgactttttcttagcgattgcttttatttggattcaatccctcgagattttgcagatataaccacactagctcttattgatatatttcgctgccaacaatctgttgggaattccgccaagcaaattcaacaggacattcaagacaactatggaagctctatcgaggtccatactcgttatctttatcgaaatggagcatttttggtagtgtga

SEQ ID NO: 593 - DNA, 2565 bp, Glycine max
  source 1..2565: mol_type = other DNA
atggtagtagcagtggagaaaaccaacctcacttcacaatcacaatgcttcaaccgtgtttctgacaagaagaaagaaagatgcaagacacacatgaacaacgttaacccatgttgttttttgtttctcttatgtgtgtggagccttgttgtgctcccctcatgcgtgaggccagttttgtgtgaagatgaaggttgggatggagtggttgtgacagcatcaaacctcttagcacttgaagctttcaagcaagagttggttgatccagaagggttcttgcggagctggaatgacagtggctatggagcttgttccggaggttgggttggaatcaagtgtgctaagggacaggttattgtgatccagcttccttggaagggtttgaggggtcgaatcaccgacaaaattggtcaacttcaaggcctcaggaagcttagtcttcatgataaccaaattggtggttcaatcccttcaactttgggacttcttcccaaccttagaggggttcagttattcaacaataggcttacaggttccatacctctttctttaggtttctgccctttgcttcagtctcttgacctcagcaacaacttgctcacaggagcaatcccttatagtcttgctaattccactaagctttattggcttaacttgagtttcaactccttctctggtcctttaccagctagcctaactcactcattttctctcacttttctttctcttcaaaataacaatctttctggctcccttcctaactcttggggtgggaattccaagaatggcttctttaggcttcaaaatttgatcctagatcataactttttcactggtgacgttcctgcttctttgggtagcttaagagagctcaatgagatttcccttagtcataataagtttagtggagctataccaaatgaaataggaaccctttctaggcttaagacacttgacatttctaataatgccttgaatgggaacttgcctgctaccctatctaatttatcctcacttacactgctgaatgcagagaacaacctccttgacaatcaaattcctcaaagtttaggtagattgcgtaatctttctgttctgattttgagtagaaaccaatttagtggacatattccttcaagtattgcaaacatttcctcgcttaggcagcttgatttgtcactgaataatttcagtggagaaattccagtctcctttgacagtcagcgcagtctaaatctcttcaatgtttcctacaatagcctctcaggttctgtcccccctctgcttgccaagaaatttaactcaagctcatttgtgggaaatattcaactatgtggatacagcccttcaaccccatgtctttcccaagctccatcacaaggagtcattgccccacctcctgaagtgtcaaaacatcaccatcataggaagctaagcaccaaagacataattctcatagtagcaggagttctcctcgtagtcctgattatactttgttgtgtcctgcttttctgcctgatcagaaagagatcaacatctaaggccgggaacggccaagccaccgagggtagagcggccactatgaggacagaaaaaggagtccctccagttgctggtggtgatgttgaagcaggtggggaggctggagggaaactagtccattttgatggaccaatggcttttacagctgatgatctcttgtgtgcaacagctgagatcatgggaaagagcacctatggaactgtttataaggctattttggaggatggaagtcaagttgcagtaaagagattgagggaaaagatcactaaaggtcatagagaatttgaatcagaagtcagtgttctaggaaaaattagacaccccaatgttttggctctgagagcctattacttgggacccaaaggggaaaagcttctggtttttgattacatgtctaaaggaagtcttgcttctttcctacatggtggtggaactgaaacattcattgattggccaacaagaatgaaaatagcacaagacttggcccgtggcttgttctgccttcattcccaggagaacatcatacatgggaacctcacatccagcaatgtgttgcttgatgagaatacaaatgctaaaattgcagattttggtctttctcggttgatgtcaactgctgctaattccaacgtgatagctacagctggagcattgggataccgggcacctgagctctcaaagctcaagaaagcaaacactaaaactgatatctacagtcttggtgttatcttgttagaactcctaacgaggaaatcacctggggtgtctatgaatggactagatttgcctcagtgggttgcctcagttgtcaaagaggagtggacaaatgaggtttttgatgcagacttgatgagagatgcatccacagttggcgacgagttgctaaacacgttgaagctcgctttgcactgtgttgatccttctccatcagcacgaccagaagttcatcaagttctccagcagctggaagagattagaccagagagatcagtcacagccagtcccggggacgatatcgtatag

SEQ ID NO: 594 - DNA, 2763 bp, Glycine max
  source 1..2763: mol_type = other DNA
atgtctctccccaaaaccctactttctctcttccttctcctcacgatccccctagtaaccgccgatgacgccgcggtgatgtcgaattttctcaaatccctcactccaccgccctcgggctggtctgaaacaaccccattctgccaatggaagggtatccaatgcgattcatccagccacgtgaccagcataagcctcgcttcgcattccctcaccggaacactcccctcggatctcaattccctctctcaactccgcactctctccctccaagacaattccctcaccggcaccctcccttctctctccaacctttctttcctccaaaccgtctacttaaaccgcaacaacttctcctccgtgtcccccaccgctttcgcctccctaacctccctccaaaccctcagcctcggctccaaccctgctctccaaccctggtccttccccaccgacctcacttcctcctctaacctaatcgacctcgacctcgccaccgtatccctcaccggtcccttgccggacattttcgacaaattcccttcccttcaacaccttcgcctctcttacaacaacctcaccggcaatttaccctcctctttctccgccgccaacaatctcgaaacgctctggctcaacaaccaggccgccggcttgtccggtaccctcctcgtcctctccaacatgtctgcattaaaccagtcctggctcaataagaaccagttcaccggttccataccggatttatcgcaatgcacggctttgtctgacttgcagctcagggataaccagttaactggtgtggttcccgcttcattgacaagtcttcctagtttgaagaaagtttctctggataataatgagcttcaggggcctgtgcccgtgtttgggaaaggtgtgaatgttactctcgatgggattaatagtttttgtcttgatactcctgggaattgtgatcccagggtgatggttttgctgcagattgccgaggcattcgggtatccaattcggttggcagagtcgtggaaggggaatgatccgtgtgatggttggaactatgttgtgtgtgctgccggaaagattattactgtcaatttcgagaaacagggtttgcagggtaccatctcccctgcatttgccaatttgactgacttgaggactttgtttctcaatggcaataatttgatcggttctatacctgatagtttgatcactttgcctcagcttcagactcttgatgtgtctgacaacaacctctctggattggttcctaagttcccaccaaaggtgaagttggtgactgcgggaaatgctttgcttgggaaaccccttagtcctggaggtggaccaagtggaactactccttctgggtcttcgaccggtggaagtggtggtgaatcctcaaagggtaattcttcggtgtcgccaggttggattgctggtatagttgttattgtgttgttttttattgcagtggtgttgtttgtgtcttggaagtgttttgtcaacaagctgcaggggaagttcagtagggttaaaggtcatgaaaatgggaaaggaggctttaaacttgatgctgtccatgtttctaatggatatggtggtgttccagttgagttgcaaagccagagcagtggtgatcgcagtgaccttcatgctttagatggtccaacattttctatccaagttcttcgacaagtgacgaataatttcagcgaggagaacattttaggcaggggagggtttggagtagtttataagggggtgttgcatgatggaacaaaaattgctgttaagaggatggaatctgttgcaatggggaacaaaggtcagaaagagttcgaagcagagattgcacttcttagtaaagttaggcatagacatttggttgctcttctagggtattgcatcaatggcaatgaaaggcttttggtgtatgagtatatgcctcaaggtacattaacacagcacctgtttgagtggcaggagcatgggtatgctcctttgacttggaagcaaagggtagtaatagctttggatgtagcgcggggggtggaatacttgcacagtttagctcagcaaagcttcattcatagagacttaaaaccctcaaacatactactaggcgatgacatgagagcaaaggttgctgattttgggttggttaaaaatgcaccagatgggaagtattctgttgagacacggttggctggaacatttggatatcttgcacctgagtatgcagctactggaagagtgacaaccaaagtggatgtttatgcatttggagtagttctgatggaacttatcaccggtagaaaggcattggatgatactgtgccagatgaaaggtctcacttggtgacatggttccgtagggtactaattaacaaggaaaacattccaaaggcaattgatcaaattctcaatccagatgaggaaaccatgggaagcatatatacagtggccgagctggcaggccattgcactgctcgcgaaccataccaaaggccggatatgggtcatgcagtgaacgtcttggttcctcttgtggagcaatggaaacctactagccatgatgaagaagaggaagacggctctggcggtgaccttcatatgagccttcctcaagctctacgaaggtggcaagccaacgaaggcacttcctcaatatttaatgacatttccatctcacaaacccaatcaagcatctcctctaaacctgcagggtttgcagactcctttgattcaatggattgccgttaa

SEQ ID NO: 595 - DNA, 405 bp, Zea mays
  source 1..405: mol_type = other DNA
atgcgcaaacatcgaatcgtctcactcgtggctgccctgctcatactgcttgccctcgccgtatcgtccaaccgcaacgcacaggaggattccatggccgacaacaccgggacgttggtgggcggcatccaggacgtgccggagaacgagaacgaccttcacctccaggagctcgcccgcttcgccgtcgatgagcacaacaagaaggccaatgctcttctggggttcgagaagcttgtgaaggccaagacacaagtggttgctggcacgatgtactatctcactattgaagtgaaggatggcgaagtcaagaagctctacgaagctaaggtctgggagaagccatgggagaagttcaaggagctgcaggaattcaagcctgttgaagagggtgctagcgcctaa

SEQ ID NO: 596 - DNA, 618 bp, Colocasia esculenta
  source 1..618: mol_type = other DNA
atggccttgatggggggcatcgtggatgtggagggagcgcagaacagcgccgaagtagaggagctcgcccgcttcgccgtcgacgaacacaataagaaggagaatgcgcttctgcagttctcccggcttgtgaaggcgaagcaacaggtggtttcgggcattatgcatcacctcactgtggaggttatcgaaggtggcaagaagaaagtgtatgaagccaaggtctgggtccaggcttggcttaactccaagaagcttcatgagttcagccccattggcgattcatcctcggttacgccagcagatctcggtgtaaaacgggatgcgcacgaagcggaatggctagagataccaacacatgatcctgtcgtccaagacgcagcaaaccatgcggtgaagagcatccagcaaagatccaatactttgttcccttatgaactgttggagatccttcatgcaaaggctaaggtgcttgaggacctcgccaaaatccatttgctactcaaacttaagaggggaagcagggaggagaagttcaaggtggaagtgcacaagaacattgaggggactttccatctgaatcagatggagcaagatcattcagactctggaaactag

SEQ ID NO: 597 - DNA, 1434 bp, synthetic construct
  source 1..1434: mol_type = other DNA
atggccatcgatagcaagactactttgcctaggcattcacttatccatacaatcaagctgaactctaacaagaagtatggtcctggtgacatgactaacggaaatcagttcatcatctcaaagcaggagtgggctactatcggagcctacatccagactggacttggattgccagtgaacgagcagcagttgaggacacatgttaacttgtctcaggatatctcaatccctagtgatttctctcagttgtatgacgtttactgttctgataagactagtgcagagtggtggaacaagaacttgtatcctttgatcatcaagtctgctaacgacatcgcttcatacggtttcaaggtggctggtgatccttctatcaagaaggatggatatttcaagaagttgcaggacgagcttgataacatcgttgataacaactctgatgacgacgcaatcgctaaggctatcaaggatttcaaggctagatgtggtatcttgatcaaggaagctaagcagtatgaggaagctgccaagaacatcgtgacatctctcgatcagttcttacatggtgatcagaagaagttagaaggtgttatcaacatccagaagaggttgaaggaagtgcagacagctcttaaccaggctcatggagagtctagtccagctcataaggagctcttggagaaagtgaagaacttgaagacaacattagagaggactatcaaggctgagcaggaccttgagaagaaagtggagtatagcttcttgttaggaccattgttgggattcgtggtttacgagatccttgagaacactgctgttcagcatatcaagaaccagatcgatgagatcaagaagcagttggattctgctcagcatgatttggacagggacgtgaagattatcggaatgttgaacagtatcaacacagatatcgacaacctttactctcaaggacaggaagcaatcaaggttttccagaagttgcaaggaatctgggctactatcggtgctcagatcgagaaccttaggacaacatcattgcaagaggttcaggactctgatgacgctgatgagatccagatcgaactcgaggacgcttctgacgcttggttggttgtggctcaggaggctagggatttcacacttaacgcttactcaactaactctaggcagaaccttccaatcaacgttatctcagattcatgtaactgttcaacaacaaacatgacatcaaaccaatacagcaatccaacaacaaacatgacatcaaaccagtacatgatctcacatgagtacacaagcttgccaaacaacttcatgttgtcaaggaactctaacttggaatacaagtgtcctgagaacaacttcatgatctattggtacaacaactctgactggtacaacaactctgattggtacaacaaccctccataa

SEQ ID NO: 598 - protein, 587 aa, Bacillus thuringiensis
KDQQLFNAIMDAVNKMVDNKFLSYNLSTLNKTIEGLQGNLGLFQNAIQVAICQGSTPERVNFDQNCTPCNPNQPCKDDLDRVASRFDTANSQFTQHLPEFKNPWSDENSTQEFKRTSVELTLPMYTTVATLHLLLYEGYIEFMTKWNFHNEQYLNNLKVELQQLIHSYSETVRTSFLQFLPTLNNRSKSSVNAYNRYVRNMTVNCLDIAATWPTFDTHNYHQGGKLDLTRIILSDTAGPIEEYTTGDKTSGPEHSNITPNNILDTPSPTYQHSFVSVDSIVYSRKELQQLDIATYSTNNSNNCHPYGLRLSYTDGSRYDYGDNQPDFTTSNNNYCHNSYTAPITLVNARHLYNAKGSLQNVESLVVSTVNGGSGSCICDAWINYLRPPQTSKNESRPDQKINVLYPITETVNKGTGGNLGVISAYVPMELVPENVIGDVNADTKLPLTQLKGFPFEKYGSEYNNRGISLVREWINGNNAVKLSNSQSVGIQITNQTKQKYEIRCRYASKGDNNVYFNVDLSENPFRNSISFGSTESSVVGVQGENGKYILKSITTVEIPAGSFYVHITNQGSSDLFLDRIEFVPKIQ

SEQ ID NO: 599 - protein, 1257 aa, Solanum lycopersicum
MEKRKDIEEANNSLVLFSALSKDIANVLIFLENEENQKALDKDQVEKLKLKMAFICTYVQLSYSDFEQFEDIMTRNRQEVENLLQSLLDDDVLTSLTSNMDDCISLYHRSYKSDAIMMDEQLDFLLLNLYHLSKHHAEKIFPGVTQYEVLQNVCGNIRDFHGLILNGCIKHEMVENVLPLFQLMAERVGHFLWEDQTDEDSRLSELDEDEHNDRDSRLFQLTHLLLKIVPTELEVMHICYTNLKASTSAEVGRFIKKLLETSPDILREYIIQLQEHMLTVIPPSTLGARNIHVMMEFLLLILSDMPKDFIHHDKLFDLLAHVGTLTREVSTLVRDLEEKLRNKEGNNQTNCATLDLLENIELLKKDLKHVYLKAPNSSQCCFPMSDGPLFMHLLHMHLNDLLDSNAYSISLIKEEIELVSQELEFIRSFFGDAAEQGLYKDIWARVLDVAYEAKDVIDSIIVRDNGLLHLIFSLPITIKKIKLIKEEISALDENIPKDRGLIVVNSPKKPVERKSLTTDKIIVGFEEETNLILRKLTSGPADLDVISITGMPGSGKTTLAYKVYNDKSVSRHFDLRAWCTVDQGYDDKKLLDTIFSQVSGSDSNLSENIDVADKLRKQLFGKRYLIVLDDVWDTTTLDELTRPFPEAKKGSRIILTTREKEVALHGKLNTDPLDLRLLRPDESWELLDKRTFGNESCPDELLDVGKEIAENCKGLPLVADLIAGVIAGREKKRSVWLEVQSSLSSFILNSEVEVMKVIELSYDHLPHHLKPCLLHFASWPKDTPLTIYLFTVYLGAEGFVEKTEMKGIEEVVKIYMDDLISSSLVICFNEIGDILNFQIHDLVHDFCLIKARKENLFDRIRSSAPSDLLPRQITIDYDEEEEHFGLNFVMFDSNKKRHSGKHLYSLRINGDQLDDSVSDAFHLRHLRLIRVLDLEPSLIMVNDSLLNEICMLNHLRYLRIRTQVKYLPFSFSNLWNLESLFVSNKGSILVLLPRILDLVKLRVLSVGACSFFDMDADESILIAKDTKLENLRILGELLISYSKDTMNIFKRFPNLQVLQFELKESWDYSTEQHWFPKLDCLTELETLCVGFKSSNTNHCGSSVVTNRPWDFHFPSNLKELLLYDFPLTSDSLSTIARLPNLENLSLYDTIIQGEEWNMGEEDTFENLKFLNLRLLTLSKWEVGEESFPNLEKLKLQECGKLEEIPPSFGDIYSLKFIKIVKSPQLEDSALKIKKYAEDMRGGNDLQILGQKNIPLFK

SEQ ID NO: 600 - protein, 912 aa, Glycine max
MAYAAVTSLMRTIHQSMELTGCDLQPFYEKLKSLRAILEKSCNIMGDHEGLTILEVEIIEVAYTTEDMVDSESRNVFLARNVGKRSRAMWGIFFVLEQALECIDSTVKQWMATSDSMKDLKPQTSSLVSLPEHDVEQPENIMVGRENEFEMMLDQLARGGRELEVVSIVGMGGIGKTTLAAKLYSDPYIMSRFDIRAKATVSQEYCVRNVLLGLLSLTSDEPDYQLADQLQKHLKGRRYLVVIDDIWTTEAWDDIKLCFPDCDNGSRILLTTRNVEVAEYASSGKPPHHMRLMNFDESWNLLHKKIFEKEGSYSPEFENIGKQIALKCGGLPLAITLIAGLLSKISKTLDEWQNVAENVRSVVSTDLEAKCMRVLALSYHHLPSHLKPCFLYFAIFAEDERIYVNKLVELWAVEGFLNEEEGKSIEEVAETCINELVDRSLISIHNVSFDGETQRCGMHDVTRELCLREARNMNFVNVIRGKSDQNSCAQSMQCSFKSRSRISIHNEEELVWCRNSEAHSIITLCIFKCVTLELSFKLVRVLDLGLTTCPIFPSGVLSLIHLRYLSLRFNPRLQQYRGSKEAVPSSIIDIPLSISSLCYLQTFKLYHPFPNCYPFILPSEILTMPQLRKLCMGWNYLRSHEPTENRLVLKSLQCLNELNPRYCTGSFLRLFPNLKKLEVFGVKEDFRNHKDLYDFRYLYQLEKLAFSTYYSSSACFLKNTAPLGSTPQDPLRFQMETLHLETHSRATAPPTDVPTFLLPPPDCFPQNLKSLTFSGDFFLAWKDLSIVGKLPKLEVLQLSHNAFKGEEWEVVEEGFPHLKFLFLDSIYIRYWRASSDHFPYLERLFLSDCFYLDSIPRDFADITTLALIDIFRCQQSVGNSAKQIQQDIQDNYGSSIEVHTRYLYRNGAFLVV

SEQ ID NO: 601 - protein, 854 aa, Glycine max
MVVAVEKTNLTSQSQCFNRVSDKKKERCKTHMNNVNPCCFLFLLCVWSLVVLPSCVRPVLCEDEGWDGVVVTASNLLALEAFKQELVDPEGFLRSWNDSGYGACSGGWVGIKCAKGQVIVIQLPWKGLRGRITDKIGQLQGLRKLSLHDNQIGGSIPSTLGLLPNLRGVQLFNNRLTGSIPLSLGFCPLLQSLDLSNNLLTGAIPYSLANSTKLYWLNLSFNSFSGPLPASLTHSFSLTFLSLQNNNLSGSLPNSWGGNSKNGFFRLQNLILDHNFFTGDVPASLGSLRELNEISLSHNKFSGAIPNEIGTLSRLKTLDISNNALNGNLPATLSNLSSLTLLNAENNLLDNQIPQSLGRLRNLSVLILSRNQFSGHIPSSIANISSLRQLDLSLNNFSGEIPVSFDSQRSLNLFNVSYNSLSGSVPPLLAKKFNSSSFVGNIQLCGYSPSTPCLSQAPSQGVIAPPPEVSKHHHHRKLSTKDIILIVAGVLLVVLIILCCVLLFCLIRKRSTSKAGNGQATEGRAATMRTEKGVPPVAGGDVEAGGEAGGKLVHFDGPMAFTADDLLCATAEIMGKSTYGTVYKAILEDGSQVAVKRLREKITKGHREFESEVSVLGKIRHPNVLALRAYYLGPKGEKLLVFDYMSKGSLASFLHGGGTETFIDWPTRMKIAQDLARGLFCLHSQENIIHGNLTSSNVLLDENTNAKIADFGLSRLMSTAANSNVIATAGALGYRAPELSKLKKANTKTDIYSLGVILLELLTRKSPGVSMNGLDLPQWVASVVKEEWTNEVFDADLMRDASTVGDELLNTLKLALHCVDPSPSARPEVHQVLQQLEEIRPERSVTASPGDDIV

SEQ ID NO: 602 - protein, 920 aa, Glycine max
MSLPKTLLSLFLLLTIPLVTADDAAVMSNFLKSLTPPPSGWSETTPFCQWKGIQCDSSSHVTSISLASHSLTGTLPSDLNSLSQLRTLSLQDNSLTGTLPSLSNLSFLQTVYLNRNNFSSVSPTAFASLTSLQTLSLGSNPALQPWSFPTDLTSSSNLIDLDLATVSLTGPLPDIFDKFPSLQHLRLSYNNLTGNLPSSFSAANNLETLWLNNQAAGLSGTLLVLSNMSALNQSWLNKNQFTGSIPDLSQCTALSDLQLRDNQLTGVVPASLTSLPSLKKVSLDNNELQGPVPVFGKGVNVTLDGINSFCLDTPGNCDPRVMVLLQIAEAFGYPIRLAESWKGNDPCDGWNYVVCAAGKIITVNFEKQGLQGTISPAFANLTDLRTLFLNGNNLIGSIPDSLITLPQLQTLDVSDNNLSGLVPKFPPKVKLVTAGNALLGKPLSPGGGPSGTTPSGSSTGGSGGESSKGNSSVSPGWIAGIVVIVLFFIAVVLFVSWKCFVNKLQGKFSRVKGHENGKGGFKLDAVHVSNGYGGVPVELQSQSSGDRSDLHALDGPTFSIQVLRQVTNNFSEENILGRGGFGVVYKGVLHDGTKIAVKRMESVAMGNKGQKEFEAEIALLSKVRHRHLVALLGYCINGNERLLVYEYMPQGTLTQHLFEWQEHGYAPLTWKQRVVIALDVARGVEYLHSLAQQSFIHRDLKPSNILLGDDMRAKVADFGLVKNAPDGKYSVETRLAGTFGYLAPEYAATGRVTTKVDVYAFGVVLMELITGRKALDDTVPDERSHLVTWFRRVLINKENIPKAIDQILNPDEETMGSIYTVAELAGHCTAREPYQRPDMGHAVNVLVPLVEQWKPTSHDEEEEDGSGGDLHMSLPQALRRWQANEGTSSIFNDISISQTQSSISSKPAGFADSFDSMDCR

SEQ ID NO: 603 - protein, 134 aa, Zea mays
MRKHRIVSLVAALLILLALAVSSNRNAQEDSMADNTGTLVGGIQDVPENENDLHLQELARFAVDEHNKKANALLGFEKLVKAKTQVVAGTMYYLTIEVKDGEVKKLYEAKVWEKPWEKFKELQEFKPVEEGASA

SEQ ID NO: 604 - protein, 205 aa, Colocasia esculenta
MALMGGIVDVEGAQNSAEVEELARFAVDEHNKKENALLQFSRLVKAKQQVVSGIMHHLTVEVIEGGKKKVYEAKVWVQAWLNSKKLHEFSPIGDSSSVTPADLGVKRDAHEAEWLEIPTHDPVVQDAANHAVKSIQQRSNTLFPYELLEILHAKAKVLEDLAKIHLLLKLKRGSREEKFKVEVHKNIEGTFHLNQMEQDHSDSGN

SEQ ID NO: 605 - protein, 475 aa, Bacillus thuringiensis
MIIDSKTTLPRHSLIHTIKLNSNKKYGPGDMTNGNQFIISKQEWATIGAYIQTGLGLPVNEQQLRTHVNLSQDISIPSDFSQLYDVYCSDKTSAEWWNKNLYPLIIKSANDIASYGFKVAGDPSIKKDGYFKKLQDELDNIVDNNSDDDAIAKAIKDFKARCGILIKEAKQYEEAAKNIVTSLDQFLHGDQKKLEGVINIQKRLKEVQTALNQAHGESSPAHKELLEKVKNLKTTLERTIKAEQDLEKKVEYSFLLGPLLGFVVYEILENTAVQHIKNQIDEIKKQLDSAQHDLDRDVKIIGMLNSINTDIDNLYSQGQEAIKVFQKLQGIWATIGAQIENLRTTSLQEVQDSDDADEIQIELEDASDAWLVVAQEARDFTLNAYSTNSRQNLPINVISDSCNCSTTNMTSNQYSNPTTNMTSNQYMISHEYTSLPNNFMLSRNSNLEYKCPESNFMIYWYNNSDWYNNSDWYNN

SEQ ID NO: 606 - DNA, 1000 bp, Pseudomonas syringae
  source 1..1000: mol_type = other DNA
atgaacaagcgctacggcaacaacttgccgggatcctgttgcgcgctgagcaaccggatcgactggacgtcaccttcgcgcagcacgccatctggcaaaaaggccgccgttaatcgtttccaatatttctgcaggagtctgcccgtgaccaccttcaccgtgcccctgattctgtcggatgcaagccccacggcactcgccgctaccgcgcaacgtctgcgcgccgagcacgagacgcgctccttcgccgctgatgactgacatcaccgtgcccttccagctcggaatgcacttcgtcttcccagctttcctgatacggctgacgatacattttgcggaagtgattgcggatcaggttcagcgcgatgccacacagccaggtctgcggtttgctggcatgttgaaacttgtgctcgttacgcagggcttcaagaaacacgcactggagaatgtcatccacatcatcagggttcatcacccgcttttggataaacgccctgcagggcgtttatccaaaagcgggtgatgaaccctgatgatgtggatgacattctccagtgcgtgtttcttgaagccctgcgtaacgagcacaagtttcaacatgccagcaaaccgcagacctggctgtgtggcatcgcgctgaacctgatccgcaatcacttccgcaaaatgtatcgtcagccgtatcaggaaagctgggaagacgaagtgcattccgagctggaagggcacggtgatgtcagtcatcagcggcgaaggagcgcgtctcgtgctcggcgcgcagacgttgcgcggtagcggcgagtgccgtggggcttgcatccgacagaatcaggggcacggtgaaggtggtcacgggcagactcctgcagaaatattggaaacgattaacggcggcctttttgccagatggcgtgctgcgcgaaggtgacgtccagtcgatccggttgctcagcgcgcaacaggatcccggcaagttgttgccgtagcgcttgttcat

SEQ ID NO: 607 - DNA, 1313 bp, Arabidopsis thaliana
  source 1..1313: mol_type = other DNA
atggcctctctattctcttcagttctcttgtctctttgtttactctcttcactttttctctcaaatgcaaacgctaagccaaaactaggcttcaccgcggatctaatccaccgtgattctcctaaatcgccgttctataacccgatggaaacctcttcccagcgtctacgaaacgcgatccaccgatccgttaaccgtgttttccatttcactgaaaaggataacacaccacaaccacagattgacctcacctcaaatagcggtgaatatctcatgaacgtatccattggaacacctcctttcccgatcatggccatcgccgacaccggaagtgatctcctctggacgcagtgcgcaccatgcgatgattgttacactcaagttgatcctctctttgaccctaaaacgtcttccacatacaaagacgtttcttgctcctcaagtcaatgtactgccctagaaaatcaagcctcttgttccacaaatgacaacacttgttcttactcattgtcttacggggataactcatacacaaagggtaacatcgccgtggataccttaacgctcggctccagcgatacccgccctatgcagcttaagaatattattatcggttgtggtcacaacaacgctggaacgtttaacaagaaaggctctggaatcgtcggactaggtggtggtccggtttcgcttatcaagcaacttggcgactccatcgacggtaaattctcatactgcttggttcctctaacttccaaaaaggatcaaacgagtaaaatcaacttcggaaccaatgccatcgtgtcgggatcaggagttgtctcaactcctctgatcgcaaaggcgtctcaagagaccttctattacctaaccctaaaatccattagcgtgggaagcaagcaaatccaatactcaggctcagattctgaaagcagcgagggaaacatcatcatcgattcaggcacaactttaacgttattaccgactgaattttactccgagctcgaggatgcggttgcatcctctatcgatgctgagaagaagcaagatccacaaagcggtttgagtctatgttacagtgcaaccggagatctaaaagttccagtcattactatgcattttgatggagccgatgtgaagcttgactcctccaatgcctttgtacaagtctcggaggatttggtttgctttgccttccgcggaagcccgagtttctccatatacggtaatgtggcgcagatgaactttcttgttggatacgacactgtttccaaaacggtgtcatttagccaacagattgtgcaaagatgtag

SEQ ID NO: 608 - DNA, 1771 bp, Poncirus trifoliata
  source 1..1771: mol_type = other DNA
ttgagaggaatatatattgtagctgttggcgactaatagatgattgttaattattaatgaatcagatattgtgttttgtgttagatttagtgattgatgatcttttcagtgacacagcgacacaaataacatcaaatatgttaatttatagttttataccatatcgattcaaaaccaaatacagtaaaacgaactaatcgttcgtaggatgatacaatcttgcgaaatacaaaatttaattactgcttggtgcagtcagtcggtctaaatgacactgtttgttgttctatgtcatagccgactaaaaagttagtctgcattatattaccataaagttgcagactattggtggtacctttaaaaacagaacatacaatatccttcgaaaccttcacaaaaaagttggaacgactcaatttcacatctgcacctctgaaatgtattgtaacttcaggaacttgagatagtgaattaaaactgtagcaaagttcaaatgatcctttggggtctgcaacaggttgtgcctcaatcatactggacattactgacaacaattttgagttataaccttgtggcaataaggtaaatgttgtaccagaatcgattacaatgtctcttcctggagtcgatccagacataacttctagtctttggtttcctacactgattgcatcaattgtgagaacataagaggttttggctttagtcaagggagtagaaaccactcctgggcctgaaacaattccattggttccaaaattgattttggttgaggttgctggaaccaaacaataggagaatttaccagcaattgtagttcgcatttgagaaataagtgaaatatcgccgcctccaaggccaacaattccggttgtttttgaattaaacaagccaccattgtttgttccgcaaccaaaggttattccaggcagagccacggcctgtcctgttgttgaacccaaagtaacagtttcggtagcaagattgccatttgagaaggatccatctccataagagaccgagtattgacaatttaccccagagcaagatttttggctaagagatgcacattggcttgaggagcatggaagagatttgtaagtagatgactttttaggatcaaaaagtggagagtcctgcatgtaacattttgatggtgggcaaggctcgcactgcgtccatatgaggtcacttcctgtatcagcaacagctagtatttcagtagcgggagtaccaattgatatacgtatgagatattctcccctattgggtattatatcagcttgggaagcggctgatgaagatattgatgagttctgattaaagtgattaagacgattgagagaacgagtcaaagcatttctcaatcgttggtagggagtttcactggagttgtaaaagggagacttgggagagtcacggtggattagctcaacactgaaacctccagtttgagcttctattggagagacaacataaaaacaaagaaagaagagaatgaatgcacaactcaagaaggttgccataatcaaagctgtgattgaggtaataagaaagtggcaacgagtctatgcttatatagaggaggacacagagagataagttgcaaaatttaattaattttgaatagaagaccaaaaaaaaaaaaaaaaggaaagaaaatgagcttccaagaaaatgaaactttcttgtgtagtaagcttttgttatagtgacaattatcttatgggagggcctaagttacgttyaacgtaayttaygccctctcaca

SEQ ID NO: 609 - DNA, 1426 bp, Poncirus trifoliata
  source 1..1426: mol_type = other DNA
atggcaaccttcttgagttgtgcattcattctcttctttttttttttttatgttgtctctccaatagaagctcaaactggaggtttcagtgttgagctaatccaccgtgactctcccaagtctcccttttacaactccagtgaaactccctaccaacgattgagaaatgcttttactcgttctaccaatcgtcccaatcactttaatcagaactcatcaatatcttcatcaaaagcttcccaagctgatataatacccaatatgggagactatctcatacgtatatcaattggtactcccgcgactgaaatactagcagttgctgatacaggaagtgacctcatatggacgcagtgcgagccttgcccaccatcacaatgttacatgcaggactctccacttttttatcctaaaaagtcatctacttacaaatctcttccatgctcctcaagccaatgtgcatctcttagccaaaaatcttgctctggggtaaattgtcaatactcggtctcttatggagatggatccttctcaaatggcaatcttgctaccgaaactgttactttgggttcaacaacaggacaggccgtggctctgcctggaataacctttggttgcggaacaaacaatggtggcttgtttaattcaaaaacaaccggaattgttggccttggaggcggcggtatttcacttatttctcaaatgcgaactacaattgctggtaaattctcctattgtttggttcaggcaagctcaaccaaaatcaattttggaaccaatggaattgtttcaggtccaggagtggtttctactcccttgattgttaaatccaaaaccttttatgctctcacaattgatgcaatcagtgtaggaaaccaaagactagaagttatgtctggatcgactccaggaggagacattgtaatcgattctggtacaacacttaccttattgccacaacgttataactcaaaattgttgtcagtaatgtccagtatgattgaggcacaacctgttgcagaccctaaaggatcacttgaactttgctacagttttaattcactatctcaagttcctgaagttacaatacatttcagaggtgcagatgtgaaattgagtccttccaacttttttgtgaaggtttcgaaggatattgtatgttctgtttttaaaggtaccaatmgtctgccactttatggtaatataatgcagactaactttttggtcggctatgacatagaacaaggaacagtgtcatttaaaccgactgattgcaccaagcaataattaattgggaagcttaatcgatattctccactctactagagtttgatcgagtgattttcaaaccactttctttagcagatcaaccgatttcaaattctaatgcgattggagctgaataaaatctatttaaataaatgta

SEQ ID NO: 610 - DNA, 192 bp, Hyalophora cecropia
  source 1..192: mol_type = other DNA
atgaatttcgcaaagatcctatccttcgtcttcgctctggtgctggctttgagcatgaccagcgctgctcccgagcccaggtggaagatcttcaagaaaattgaaaaaatgggcaggaacatccgtgatggcatcgtcaaagcgggcccggcgatcgaggtcctcggttcggctaaagctataggaaaatga

SEQ ID NO: 611 - DNA, 33 bp, synthetic construct
  source 1..33: mol_type = other DNA
aaaaaactgtttaaaaaaattctgaaatatctg

SEQ ID NO: 612 - DNA, 45 bp, synthetic construct
  source 1..45: mol_type = other DNA
aaatggaaactgtttaaaaaaattggcgcggtgctgaaagtgctg

SEQ ID NO: 613 - DNA, 219 bp, Medicago truncatula
  source 1..219: mol_type = other DNA
atggagaagaaatcactagcaggcttatgcttcctcttcctcgttctctttgttgcacaagaaattgtggtgactgaagctaagacttgtgagaatttggctgataaatacaggggaccatgctttagtggttgtgatactcactgcactaccaaagagaatgcagttagcggcaggtgcagggatgactttcgttgttggtgtactaaaagatgttaa

SEQ ID NO: 614 - DNA, 495 bp, Raphanus sativus
  source 1..495: mol_type = other DNA
atggagaagaaatcactagctggcttgtgcttcctcttcctcgttctctttgttgcacaagaaattgtggtgactgaagccaaaacttgtgagaatttggctgataaatacaggggaccatgcttcagtggctgtgacactcattgcacaaccaaagaacacgcagttagcggcaggtgcagggatgactttcgctgctggtgtactaaaagatgtagcaacgcagcagacgaggtggcgacgccacaagacatggctaagtttgcttctatcattgtccttctcttcgttgctcttgtcgtttttgctgctttcgaagaaccaacaatggtggaagcacagaagttgtgtcagaggccaagtgggacatggtcaggagtctgtggaaataataacgcatgcaagaatcagtgcattcgacttgagaaagcacgacatgggtcttgcaactatgtcttcccagctcacaagtgtatctgttatttcccttgttaa

SEQ ID NO: 615 - DNA, 243 bp, Arabidopsis thaliana
  source 1..243: mol_type = other DNA
atggctaagtctgctaccatcgttactcttttcttcgctgctcttgttttctttgctgctcttgaagcaccgatggtggtggaagcacagaagttgtgcgagaggccaagtgggacatggtccggagtttgcggaaacagtaacgcgtgcaagaatcagtgcattaaccttgagaaagcacgacatggatcttgcaactatgtcttcccagctcacaaatgtatctgctacttcccatgttaa

SEQ ID NO: 616 - DNA, 24 bp, Brassica oleracea
  source 1..24: mol_type = other DNA
ttttggcagaaaatgagctttgcg

SEQ ID NO: 617 - DNA, 21 bp, Photorhabdus sp.
  source 1..21: mol_type = other DNA
tggaactggagcaaaagcttt

SEQ ID NO: 618 - DNA, 30 bp, Urechis unicinctus
  source 1..30: mol_type = other DNA
gcggcgggcatgggcttttttggcgcgcgc

SEQ ID NO: 619 - protein, 437 aa, Arabidopsis thaliana
MASLFSSVLLSLCLLSSLFLSNANAKPKLGFTADLIHRDSPKSPFYNPMETSSQRLRNAIHRSVNRVFHFTEKDNTPQPQIDLTSNSGEYLMNVSIGTPPFPIMAIADTGSDLLWTQCAPCDDCYTQVDPLFDPKTSSTYKDVSCSSSQCTALENQASCSTNDNTCSYSLSYGDNSYTKGNIAVDTLTLGSSDTRPMQLKNIIIGCGHNNAGTFNKKGSGIVGLGGGPVSLIKQLGDSIDGKFSYCLVPLTSKKDQTSKINFGTNAIVSGSGVVSTPLIAKASQETFYYLTLKSISVGSKQIQYSGSDSESSEGNIIIDSGTTLTLLPTEFYSELEDAVASSIDAEKKQDPQSGLSLCYSATGDLKVPVITMHFDGADVKLDSSNAFVQVSEDLVCFAFRGSPSFSIYGNVAQMNFLVGYDTVSKTVSFKPTDCAKM

SEQ ID NO: 620 - protein, 63 aa, Hyalophora cecropia
MNFAKILSFVFALVLALSMTSAAPEPRWKIFKKIEKMGRNIRDGIVKAGPAIEVLGSAKAIGK

SEQ ID NO: 621 - protein, 11 aa, synthetic construct
KKLFKKILKYL

SEQ ID NO: 622 - protein, 15 aa, synthetic construct
KWKLFKKIGAVLKVL

SEQ ID NO: 623 - protein, 72 aa, Medicago truncatula
MEKKSLAGLCFLFLVLFVAQEIVVTEAKTCENLADKYRGPCFSGCDTHCTTKENAVSGRCRDDFRCWCTKRC

SEQ ID NO: 624 - protein, 164 aa, Raphanus sativus
MEKKSLAGLCFLFLVLFVAQEIVVTEAKTCENLADKYRGPCFSGCDTHCTTKEHAVSGRCRDDFRCWCTKRCSNAADEVATPQDMAKFASIIVLLFVALVVFAAFEEPTMVEAQKLCQRPSGTWSGVCGNNNACKNQCIRLEKARHGSCNYVFPAHKCICYFPC

SEQ ID NO: 625 - protein, 80 aa, Arabidopsis thaliana
MAKSATIVTLFFAALVFFAALEAPMVVEAQKLCERPSGTWSGVCGNSNACKNQCINLEKARHGSCNYVFPAHKCICYFPC

SEQ ID NO: 626 - protein, 8 aa, Brassica oleracea
FWQKMSFA

SEQ ID NO: 627 - protein, 7 aa, Photorhabdus sp.
WNWSKSF

SEQ ID NO: 628 - protein, 10 aa, Urechis unicinctus
AAGMGFFGAR

SEQ ID NO: 629 - DNA, 3384 bp, Apple latent spherical virus
  source 1..3384: mol_type = other DNA
tcgttttagagtttatgagaactgtgcgttgtttgtttcaagttccttttgttctgtttcttgccatcatctcaccttttctcatatcctctaccgataaacacccaatcctttcttctttaaacaatctttgtattgttttcttattttttatattttcttatcttgatactcatctctcgggtatcctctttgaccttcgcaagaaggccatctttgatcgcttggatcgttaccaagccatccctcttcctcctccattgccaatcttggcaatttctgttttccctctttcctccccttcttctcaaatggcttttgagccaattagggagcaattagctcccgaggaagtcccggactctttccgggtggagacgcccgcggctatgctggcgcgtctccgtgctgaagcagccgttaagagggctgctgctgctaaggcaaaaatgccttacagcgatgacttgatggtgggctctgagctcacctacttggccaaggatgatgtctttggtccaggagtgggcgcacttaagcgcctcttcagcaggccttctgctgaagaatctgtggtggtaacccaccccttgtccgtcaaggatcaagtggtgcgctaccagcggcctcgtacagaccatgatcctttcgtggctgtgtacaccccactcccccatatcaccgaggagcaagctcggaaactcatggaaaagggcttttccaattcttcaaatgtagcccttgacatgtctgttcaaagccatgttggacaaggtaccccattacttgctatgtgtggtatcatggactctcgcaccgatgaccccaatgaagccttgcaagttgcaggctattttgatcttgggcgagataaatgtgatctcatctccttaccgctaatcaattttcctttgaataaagaggattttgatgattatatgcgaggtttgtatctttgcacaatgtttcacaatgtgcgaggatttcaaaacaacaaagctctctgtagttattctgcagtgggctttgatcagcataaggagactccacgttgcatccgatctagagtcaaacaatcctgggaagatatattggccagaaacaacgaaagtgaatacactagagttcaatctggtcagaatcttcttaatgctattgagaaagatcggaatgaagcaattcctgatgttggggagcatcagttttcttgcataccacctcatacaggtacaccggtaacttcattgttaacttctgatggtgtcctcaagaggccaaacttcactcttccaagaagtgcttccactcgttttactatgccactgaacatgcgttactcaggacgcaattcagttgaaaatgcgaggcactccttatcctatcaatccaaagatacttctagtttgcatagatctgacccaaatctgctagaaggtcagggccctgatttcacaaagattatctggcccacggtcgtggaacgaaacttttctaatccacagagtgaaatcacgaccaccttgcaagagttatatggagacacttttgagactgtttccatttgccctccccaatcttatgggggagaactcttgaaagggaaaattttcttttcttctactccagaatttaccagggaggaccttgttgaagggaaaatccttgcttcctttaagcttgatgaggttttatcaggcttgggaatgggagctatgctgatgacgcagatcatgagtggtcatgctaccattcgagtatctgctaaagttatgctcagtaagttttgtagttttgctttaaaacttgtgtatgatgaactcatgcaattgaattctgacaccactgatttcggtaagatcagtgttcttcctggagcaatttttagcacacaagaagaagagttttcttttgattttgaattgttttcacctggtgttcatcttaagtttgataacaacaagcttttggggaaagttcacctggcagctctcagtgctcccaatttgacagagaatatgcctgagagtttttcttgtacatttaatttctctattgtagatgtaaaaactacattctataatataggacagggtgcttgtttgagtatacccaattttcctgtacatataacgggcaaaactcaacagttacatgtggggccaaaaccttctatagcccggttctcttttaatccttttgatttaggaaccgtgtttaataggtttcagtccttgtgtgctcatcttgagggctactcaggtgatttaattgtaaattggctcgtcacctgttcagctctaactaacgcaagattgtatataatacctgtgtacgataattactcttttgagaagttttctgaggagaaactgattcaatgtaaatatgaatttaaacaaatcagtttagtgcgtaaaggaactgtgcatattccttttgtgaattggtttggttcctattctcgcactcgctttcctaagcttctcttttattttcctaacggtgtatctggaccttcaggggaaaaaatacacgttactgtgcagttagatagaattttaaacttttcaggcttgggacaccgtctattcaaggaaattggtcctttagtaggcgagggttctgaccctttttcttttcttctcaattatagtcattgtggaactctcgttgagagttctctaaataagggaggcatgtggtgtgtacctgtttcccctgtaaatcttgccgcttacacactccaaggagaggcgctagtctttaatgatgcttttgtgtctaaaacgcacaactggcttcattttatggctagtacaacagcctattggcgtggtaccttgcattatcaaatgcgagttacttacaaagataggaatgcagcctgtcgcaaccttgtggctttttatactactaataatgaatctctttttggtttcaataacaagccagttggcgacactggcatatcttctgttatgggagattccttctctgtagatattacagttccttttcttattcccacgtgctatttgcaaacaatacgtgggaagtttgattacctaaatagttgcaatggttgtatttatttccatttaccaactaagagtgccacttcagtgcaactctgggtcaggccaggtcaggattttgactttgccaggttcagattgctcaaagctggttacacctagtttggtctttctgctatctttgagtccttttctttttctctttcttttgaactagtttgatctcgtgacctctggtccgttaggtttcttgctggctcttcctaagatgagatcttgaaccagcctagttcttttgttgcttttgcttttgctttagtgtgctcaaaaatgtcggatagtccaatcc

SEQ ID NO: 630 - DNA, 5776 bp, Soybean latent spherical virus
  source 1..5776: mol_type = other DNA
tatattcttttgtagtgtgcaacatggtgtggtctccagataaagttttatctcttcacgctcaaatccgtgcatcttttgcacaaaagaattctttttcttcaactgttgttgtatctcccttgccagagggagataatgctattagcacggctgtgctatcaccagtggtgccagctactggtgccctcaatgccttgagggaaaaactttctgctgagggcgttgtaccctcaaaggtggtgttgcctattgtaggcccatcttatgcagctaggagagcaactgttctcctaggattggtggagagggccatgaaattggcctccactattgtctaccgcaccctcttccagaggcgtagtggtagaaaagtttatgctttggaaccatggagggttccctttgcccgcttgttgggcattgttgttgctatgcgcatggaaaatgcgcctgttgcaggtccagttgaccgcgaagtgaagctcttagaagagccagttgaaggtcctgtagaccatcaatttgtggacatgtttccgcatattaataattacttcctcttttatgaagaagaggaacaagaaagggttactccctctttggaggagagatacgggaaatttcgccccataaccccaatgctaggtcctatgaaatggacctatgagaggaaggaattattaccccccccatccactatagaagacctgtgtacactacacggggccttcttatcgatgatccaggcttggatacatatggagagccaaggcatcgattcgttggaagagtattatgcggatgatggatgggaaacctcttcggaccaagattatgaagaagacgaagaggatgaggaagaggaagaatgcgttgtggcacatgatgagtattatgccaccgcattctgtgggcctttcaataacccacaacaatatgcatatgcgataggaccttttaaacctaatcgcatgagtagggagtctttttctcccattttgtctttaatagataccatcttcccacaaattaaggaggatgattttatttttcgggtatctgtggaaaagcgtatcccaaattggggtccattccacgggttacctaaaaccattccttaccattttagtagaggtgaggaaaattatttttttcccgcaagacccaaagtgatttatcacgaatgggaattgcgaaattttgaaaaatgtccttggttgcaccatcaaatgatggcttgtgacggtttccggtttgtagaccggttttttgtgtttcaatgctattggtgttcttttgaagcattgaaacaccaaggaaaggttgagcaagctgttcgtgcacatagaattgctcactttaataaacaatttgaggagcctcctcccgctgaaattaaaaagggaggaccttcaggaaccatagctcaagtgggcatggtttttggtggtaaagcaataacaaccatccgcaatactgtggagtttgcaacttgtaaatatgtgaatgcgcactccggtagagaggatgaagagatgaggtctaatttgcacgatagggcctcctctgagatagctgaacatggtgcccccactatatctaatgctattgaagttcttagaacgcgcaagcgaagtaagaacaacaaaacgctagtccatggtgaggggcgctttggggatgagaatacccacattacagaaaaggacgttttcgagaaagttgtacataataatatgtctcgaagagtgctttctaagttgggtgctccagacccaaaaattttgacacaaaacacctttcccactttgcacgaaacggttttcatgcctcagaaccggaagaaatgtatatattcaccacttccagtgtttaaggaggatgaactgcgtgcattattggataagcatgaaatgaagagcagtggtataactgctatagatctagctatccaatctcatatacctgagggccatcctgctgttgctttttgtacagtgatggatggtgattgtgggaatcctaatttagcggcactatctggatcaaaatttgatctagggagggatagatgtcaagtgatcacactcccattggtgaacgtcaacctaaattatgcactgaatcaattaaatttggataatgatgtgcgtttatatttagctactctcttaaatgagggtgttgacaaacttgttgggcgtccggttttttcctatggtaccagtattttgctggaacatcgtagagatgctcttactaatcaaactttgtgtaaggatgattggttggagattgaaaaacggaatgtccagaaaggaaatagaatcctggaaggttttaatgttgaacaacatatagcccaggattataaccaagaattggcgccctttgcccctgatcttaagttggaatgtcgtccaaatgtggtggcagagggtgcaacacatgccttttcggcgaaaggtatagtgaaaaattctttaaacagccgattggggaggtccatgtctgttcaattcttgaatgatatcggaagttcatcaagacgaacagaatttagacctcctgttgtacaggactttggaggtattgccgcaggctttgctaatcatactgagggtagtacttccaaatttgaagctcctaggtataccaatgctcaaagtggattggaaaatccatatgtggttgcggttaccaaaccctttgctgtaaagaaagacgcaaaggagggaactttgattactagtctagatttttataatttaataaagcagcagcatcgatcgcctttttatgattgggctgccaagggattgattgatcctgaaattgtaattaaaacttatgcaggatctaatcaattcgtgggtacaactatagccattgcacacgatttcttttctagagttgatgtgcaaggtaagctaggagggaaaatgtcaagagtgataggtaattgcctaccccagacattgcatcctcttagtgagggggctataggaacccacaatgtaaatattgaaaaatatgtaggacatagtttttattttaatagtcccacatttgcagatccacagtttcatgtatatatttattcaacgaatgctgtggaaatggaatctgattggcaattgacaattgagattctaattaggaaaagagagagtgagatgtctgcaagtcttactccgattttgaccgtaccccaaaaccctagtgcttatgttgatttagatttatataagggttttggtgaaataaagttggctagtaggccccaggaggtgatgattgccatggatattgctgaatcacgagcatatagtgacagtcattattgcctaggtttaccacaggctatgttccgaacaatgcagggatctagcgggattttgcacggccgtttacggcgtgttggttcttgtttggtttcttgcgttgcgaggctagttatgtggtggggcagtgatccgccaacgctggctgaaacctccatgtatccatttgttgatatagattttcaagttagtgatggagagttcagcctgaaaatacaaagtgcttttgctcgttttccaaaccgcgagcgaaaagcgtggttagtagtctacccattgggtggaccacttgctgcaaaaggtgtgggaacctcattccaatttgccatttatttaaagggaatagaggtttctgaaccaatgcccccggttctactgccagatcatgaatatgtgtggatgcaagttaatcctcctaaccaaggggaatttacttttgatcttcctaatcatatttgtgatgtcaaagtttctggcgcaacaacattgttgcgagagaatccacttgcatgtatctttggtgcatgtggtttctttgcaggaacattgaccatgacggtagggtggtctaatcggggaggcataagtactaaagaaagtactttatggtttggcaagtgctatggagatagagttggaacaagagaaatcttggaccactgtacttttaatgcccatcaggcgggtagttgttcctatgcacttgaggtgggtgatttctctggttttcaaattccagggagtacgggcaacaaacatcaatacatttcggtgtggatggagaacgcaggttctgtatctcactttcgtattagtgttaggctccatagggggttttccttctatggtcgctcgtgtcttccaataaaatgagaaggcccacctttctttgctagtttctttataaaagtaaactagtccttgggggcgggtagctccctccagcagcttggcacttgattagctttaatagtgttagctacccttcagcaaggtaggagctgcggtcgtattcgaaccgttcccgtggaactactcggggttggaagcaatggcgtattagacgctggtgtcatagttcttaaatcttatatgacactagagaggagagccatccctcttgaagcatgcaataaacaaggttgcaccatgaaactagccagcacattgaaaaatgtggcttaagggcttaataccttcgggcgttttggtggacctaacgttatgcgtgattgctgatggtactaatgtactcatgttttccattacatgataaaaggtggattcccttttcagctatgggttatggaatgatcaactcatgcaccagagtgtactaggttagtgtacaaccctctttttgctacctttttctttgcatgaataaaggagatagttcctgtgaaattcaggttcattatcatttactgctttaatttacttttatccctcatctgagtgagacagatggtacgggttgttaataaaagtgtttgggatgcactgtctgatccctcgctgctggagcgatctgagtccagccgcatttgctgcttttagatataagcagatggaggactagcactccccttgagaacaaaacgagtgcggcctagcgtctaggatttcctagcataggtgacgtgggctaagcataccacagaaacatgcttcgtctttgagctaagtgtgaccgtgatggacacttgcctgtgttctttagcacagtgtgatttccttttagtaggtgatgatgaatgtagttttgaaactatcaccgaggtctgggaatataagcgttttggcaaacgatattgccttaatctgtgtacgacacaattgatagtgtactcaagagagtagggtctggcagcctgaatcttggatgaggtcccgagataaaaacgggggggtaattaaccccagctatcggtacacggagatttccacgtttatgtaaatgtggcgcatttgctgtttttagatataaacagatattgcaggtagaaaacctgtgtggatacctattcttggagaaggagttcgctcggaagagtactatcttgaaacatttcaaaaggaaatttcattttaaggagagtaggtaagccattatacacctgtgaggagggtacaagataaagctactgctaaatttaatgctactggaagtgattcccagggctacatgcggtgccattgtacttatacctgaagggtgagtttggaaactcctacctattgaaatggtgagaagtgtttatttagtaagctcctaatcattatagggtgacgttgttttcgcaattttgttggtctttaatccttttcaaaattgcttttgcattttattttatgtagagtcggggaaaagaacatgtgtgtgtgtttggattcccaatgggtagactataccaatgttagtcccc

SEQ ID NO: 631 - DNA, 23 bp, Soybean latent spherical virus
  source 1..23: mol_type = other DNA
tatattcttttgtagtgtgcaac

SEQ ID NO: 632 - protein, 961 aa, Apple latent spherical virus
MAFEPIREQLAPEEVPDSFRVETPAAMLARLRAEAAVKRAAAAKAKMPYSDDLMVGSELTYLAKDDVFGPGVGALKRLFSRPSAEESVVVTHPLSVKDQVVRYQRPRTDHDPFVAVYTPLPHITEEQARKLMEKGFSNSSNVALDMSVQSHVGQGTPLLAMCGIMDSRTDDPNEALQVAGYFDLGRDKCDLISLPLINFPLNKEDFDDYMRGLYLCTMFHNVRGFQNNKALCSYSAVGFDQHKETPRCIRSRVKQSWEDILARNNESEYTRVQSGQNLLNAIEKDRNEAIPDVGEHQFSCIPPHTGTPVTSLLTSDGVLKRPNFTLPRSASTRFTMPLNMRYSGRNSVENARHSLSYQSKDTSSLHRSDPNLLEGQGPDFTKIIWPTVVERNFSNPQSEITTTLQELYGDTFETVSICPPQSYGGELLKGKIFFSSTPEFTREDLVEGKILASFKLDEVLSGLGMGAMLMTQIMSGHATIRVSAKVMLSKFCSFALKLVYDELMQLNSDTTDFGKISVLPGAIFSTQEEEFSFDFELFSPGVHLKFDNNKLLGKVHLAALSAPNLTENMPESFSCTFNFSIVDVKTTFYNIGQGACLSIPNFPVHITGKTQQLHVGPKPSIARFSFNPFDLGTVFNRFQSLCAHLEGYSGDLIVNWLVTCSALTNARLYIIPVYDNYSFEKFSEEKLIQCKYEFKQISLVRKGTVHIPFVNWFGSYSRTRFPKLLFYFPNGVSGPSGEKIHVTVQLDRILNFSGLGHRLFKEIGPLVGEGSDPFSFLLNYSHCGTLVESSLNKGGMWCVPVSPVNLAAYTLQGEALVFNDAFVSKTHNWLHFMASTTAYWRGTLHYQMRVTYKDRNAACRNLVAFYTTNNESLFGFNNKPVGDTGISSVMGDSFSVDITVPFLIPTCYLQTIRGKFDYLNSCNGCIYFHLPTKSATSVQLWVRPGQDFDFARFRLLKAGYT

SEQ ID NO: 633 - protein, 1398 aa, Soybean latent spherical virus
MVWSPDKVLSLHAQIRASFAQKNSFSSTVVVSPLPEGDNAISTAVLSPVVPATGALNALREKLSAEGVVPSKVVLPIVGPSYAARRATVLLGLVERAMKLASTIVYRTLFQRRSGRKVYALEPWRVPFARLLGIVVAMRMENAPVAGPVDREVKLLEEPVEGPVDHQFVDMFPHINNYFLFYEEEEQERVTPSLEERYGKFRPITPMLGPMKWTYERKELLPPPSTIEDLCTLHGAFLSMIQAWIHMESQGIDSLEEYYADDGWETSSDQDYEEDEEDEEEEECVVAHDEYYATAFCGPFNNPQQYAYAIGPFKPNRMSRESFSPILSLIDTIFPQIKEDDFIFRVSVEKRIPNWGPFHGLPKTIPYHFSRGEENYFFPARPKVIYHEWELRNFEKCPWLHHQMMACDGFRFVDRFFVFQCYWCSFEALKHQGKVEQAVRAHRIAHFNKQFEEPPPAEIKKGGPSGTIAQVGMVFGGKAITTIRNTVEFATCKYVNAHSGREDEEMRSNLHDRASSEIAEHGAPTISNAIEVLRTRKRSKNNKTLVHGEGRFGDENTHITEKDVFEKVVHNNMSRRVLSKLGAPDPKILTQNTFPTLHETVFMPQNRKKCIYSPLPVFKEDELRALLDKHEMKSSGITAIDLAIQSHIPEGHPAVAFCTVMDGDCGNPNLAALSGSKFDLGRDRCQVITLPLVNVNLNYALNQLNLDNDVRLYLATLLNEGVDKLVGRPVFSYGTSILLEHRRDALTNQTLCKDDWLEIEKRNVQKGNRILEGFNVEQHIAQDYNQELAPFAPDLKLECRPNVVAEGATHAFSAKGIVKNSLNSRLGRSMSVQFLNDIGSSSRRTEFRPPVVQDFGGIAAGFANHTEGSTSKFEAPRYTNAQSGLENPYVVAVTKPFAVKKDAKEGTLITSLDFYNLIKQQHRSPFYDWAAKGLIDPEIVIKTYAGSNQFVGTTIAIAHDFFSRVDVQGKLGGKMSRVIGNCLPQTLHPLSEGAIGTHNVNIEKYVGHSFYFNSPTFADPQFHVYIYSTNAVEMESDWQLTIEILIRKRESEMSASLTPILTVPQNPSAYVDLDLYKGFGEIKLASRPQEVMIAMDIAESRAYSDSHYCLGLPQAMFRTMQGSSGILHGRLRRVGSCLVSCVARLVMWWGSDPPTLAETSMYPFVDIDFQVSDGEFSLKIQSAFARFPNRERKAWLVVYPLGGPLAAKGVGTSFQFAIYLKGIEVSEPMPPVLLPDHEYVWMQVNPPNQGEFTFDLPNHICDVKVSGATTLLRENPLACIFGACGFFAGTLTMTVGWSNRGGISTKESTLWFGKCYGDRVGTREILDHCTFNAHQAGSCSYALEVGDFSGFQIPGSTGNKHQYISVWMENAGSVSHFRISVRLHRGFSFYGRSCLPIK

SEQ ID NO: 634 - DNA, 2886 bp, Apple latent spherical virus
  source 1..2886: mol_type = other DNA
atggcttttgagccaattagggagcaattagctcccgaggaagtcccggactctttccgggtggagacgcccgcggctatgctggcgcgtctccgtgctgaagcagccgttaagagggctgctgctgctaaggcaaaaatgccttacagcgatgacttgatggtgggctctgagctcacctacttggccaaggatgatgtctttggtccaggagtgggcgcacttaagcgcctcttcagcaggccttctgctgaagaatctgtggtggtaacccaccccttgtccgtcaaggatcaagtggtgcgctaccagcggcctcgtacagaccatgatcctttcgtggctgtgtacaccccactcccccatatcaccgaggagcaagctcggaaactcatggaaaagggcttttccaattcttcaaatgtagcccttgacatgtctgttcaaagccatgttggacaaggtaccccattacttgctatgtgtggtatcatggactctcgcaccgatgaccccaatgaagccttgcaagttgcaggctattttgatcttgggcgagataaatgtgatctcatctccttaccgctaatcaattttcctttgaataaagaggattttgatgattatatgcgaggtttgtatctttgcacaatgtttcacaatgtgcgaggatttcaaaacaacaaagctctctgtagttattctgcagtgggctttgatcagcataaggagactccacgttgcatccgatctagagtcaaacaatcctgggaagatatattggccagaaacaacgaaagtgaatacactagagttcaatctggtcagaatcttcttaatgctattgagaaagatcggaatgaagcaattcctgatgttggggagcatcagttttcttgcataccacctcatacaggtacaccggtaacttcattgttaacttctgatggtgtcctcaagaggccaaacttcactcttccaagaagtgcttccactcgttttactatgccactgaacatgcgttactcaggacgcaattcagttgaaaatgcgaggcactccttatcctatcaatccaaagatacttctagtttgcatagatctgacccaaatctgctagaaggtcagggccctgatttcacaaagattatctggcccacggtcgtggaacgaaacttttctaatccacagagtgaaatcacgaccaccttgcaagagttatatggagacacttttgagactgtttccatttgccctccccaatcttatgggggagaactcttgaaagggaaaattttcttttcttctactccagaatttaccagggaggaccttgttgaagggaaaatccttgcttcctttaagcttgatgaggttttatcaggcttgggaatgggagctatgctgatgacgcagatcatgagtggtcatgctaccattcgagtatctgctaaagttatgctcagtaagttttgtagttttgctttaaaacttgtgtatgatgaactcatgcaattgaattctgacaccactgatttcggtaagatcagtgttcttcctggagcaatttttagcacacaagaagaagagttttcttttgattttgaattgttttcacctggtgttcatcttaagtttgataacaacaagcttttggggaaagttcacctggcagctctcagtgctcccaatttgacagagaatatgcctgagagtttttcttgtacatttaatttctctattgtagatgtaaaaactacattctataatataggacagggtgcttgtttgagtatacccaattttcctgtacatataacgggcaaaactcaacagttacatgtggggccaaaaccttctatagcccggttctcttttaatccttttgatttaggaaccgtgtttaataggtttcagtccttgtgtgctcatcttgagggctactcaggtgatttaattgtaaattggctcgtcacctgttcagctctaactaacgcaagattgtatataatacctgtgtacgataattactcttttgagaagttttctgaggagaaactgattcaatgtaaatatgaatttaaacaaatcagtttagtgcgtaaaggaactgtgcatattccttttgtgaattggtttggttcctattctcgcactcgctttcctaagcttctcttttattttcctaacggtgtatctggaccttcaggggaaaaaatacacgttactgtgcagttagatagaattttaaacttttcaggcttgggacaccgtctattcaaggaaattggtcctttagtaggcgagggttctgaccctttttcttttcttctcaattatagtcattgtggaactctcgttgagagttctctaaataagggaggcatgtggtgtgtacctgtttcccctgtaaatcttgccgcttacacactccaaggagaggcgctagtctttaatgatgcttttgtgtctaaaacgcacaactggcttcattttatggctagtacaacagcctattggcgtggtaccttgcattatcaaatgcgagttacttacaaagataggaatgcagcctgtcgcaaccttgtggctttttatactactaataatgaatctctttttggtttcaataacaagccagttggcgacactggcatatcttctgttatgggagattccttctctgtagatattacagttccttttcttattcccacgtgctatttgcaaacaatacgtgggaagtttgattacctaaatagttgcaatggttgtatttatttccatttaccaactaagagtgccacttcagtgcaactctgggtcaggccaggtcaggattttgactttgccaggttcagattgctcaaagctggttacacctag

SEQ ID NO: 635 - DNA, 4197 bp, Soybean latent spherical virus
  source 1..4197: mol_type = other DNA
atggtgtggtctccagataaagttttatctcttcacgctcaaatccgtgcatcttttgcacaaaagaattctttttcttcaactgttgttgtatctcccttgccagagggagataatgctattagcacggctgtgctatcaccagtggtgccagctactggtgccctcaatgccttgagggaaaaactttctgctgagggcgttgtaccctcaaaggtggtgttgcctattgtaggcccatcttatgcagctaggagagcaactgttctcctaggattggtggagagggccatgaaattggcctccactattgtctaccgcaccctcttccagaggcgtagtggtagaaaagtttatgctttggaaccatggagggttccctttgcccgcttgttgggcattgttgttgctatgcgcatggaaaatgcgcctgttgcaggtccagttgaccgcgaagtgaagctcttagaagagccagttgaaggtcctgtagaccatcaatttgtggacatgtttccgcatattaataattacttcctcttttatgaagaagaggaacaagaaagggttactccctctttggaggagagatacgggaaatttcgccccataaccccaatgctaggtcctatgaaatggacctatgagaggaaggaattattaccccccccatccactatagaagacctgtgtacactacacggggccttcttatcgatgatccaggcttggatacatatggagagccaaggcatcgattcgttggaagagtattatgcggatgatggatgggaaacctcttcggaccaagattatgaagaagacgaagaggatgaggaagaggaagaatgcgttgtggcacatgatgagtattatgccaccgcattctgtgggcctttcaataacccacaacaatatgcatatgcgataggaccttttaaacctaatcgcatgagtagggagtctttttctcccattttgtctttaatagataccatcttcccacaaattaaggaggatgattttatttttcgggtatctgtggaaaagcgtatcccaaattggggtccattccacgggttacctaaaaccattccttaccattttagtagaggtgaggaaaattatttttttcccgcaagacccaaagtgatttatcacgaatgggaattgcgaaattttgaaaaatgtccttggttgcaccatcaaatgatggcttgtgacggtttccggtttgtagaccggttttttgtgtttcaatgctattggtgttcttttgaagcattgaaacaccaaggaaaggttgagcaagctgttcgtgcacatagaattgctcactttaataaacaatttgaggagcctcctcccgctgaaattaaaaagggaggaccttcaggaaccatagctcaagtgggcatggtttttggtggtaaagcaataacaaccatccgcaatactgtggagtttgcaacttgtaaatatgtgaatgcgcactccggtagagaggatgaagagatgaggtctaatttgcacgatagggcctcctctgagatagctgaacatggtgcccccactatatctaatgctattgaagttcttagaacgcgcaagcgaagtaagaacaacaaaacgctagtccatggtgaggggcgctttggggatgagaatacccacattacagaaaaggacgttttcgagaaagttgtacataataatatgtctcgaagagtgctttctaagttgggtgctccagacccaaaaattttgacacaaaacacctttcccactttgcacgaaacggttttcatgcctcagaaccggaagaaatgtatatattcaccacttccagtgtttaaggaggatgaactgcgtgcattattggataagcatgaaatgaagagcagtggtataactgctatagatctagctatccaatctcatatacctgagggccatcctgctgttgctttttgtacagtgatggatggtgattgtgggaatcctaatttagcggcactatctggatcaaaatttgatctagggagggatagatgtcaagtgatcacactcccattggtgaacgtcaacctaaattatgcactgaatcaattaaatttggataatgatgtgcgtttatatttagctactctcttaaatgagggtgttgacaaacttgttgggcgtccggttttttcctatggtaccagtattttgctggaacatcgtagagatgctcttactaatcaaactttgtgtaaggatgattggttggagattgaaaaacggaatgtccagaaaggaaatagaatcctggaaggttttaatgttgaacaacatatagcccaggattataaccaagaattggcgccctttgcccctgatcttaagttggaatgtcgtccaaatgtggtggcagagggtgcaacacatgccttttcggcgaaaggtatagtgaaaaattctttaaacagccgattggggaggtccatgtctgttcaattcttgaatgatatcggaagttcatcaagacgaacagaatttagacctcctgttgtacaggactttggaggtattgccgcaggctttgctaatcatactgagggtagtacttccaaatttgaagctcctaggtataccaatgctcaaagtggattggaaaatccatatgtggttgcggttaccaaaccctttgctgtaaagaaagacgcaaaggagggaactttgattactagtctagatttttataatttaataaagcagcagcatcgatcgcctttttatgattgggctgccaagggattgattgatcctgaaattgtaattaaaacttatgcaggatctaatcaattcgtgggtacaactatagccattgcacacgatttcttttctagagttgatgtgcaaggtaagctaggagggaaaatgtcaagagtgataggtaattgcctaccccagacattgcatcctcttagtgagggggctataggaacccacaatgtaaatattgaaaaatatgtaggacatagtttttattttaatagtcccacatttgcagatccacagtttcatgtatatatttattcaacgaatgctgtggaaatggaatctgattggcaattgacaattgagattctaattaggaaaagagagagtgagatgtctgcaagtcttactccgattttgaccgtaccccaaaaccctagtgcttatgttgatttagatttatataagggttttggtgaaataaagttggctagtaggccccaggaggtgatgattgccatggatattgctgaatcacgagcatatagtgacagtcattattgcctaggtttaccacaggctatgttccgaacaatgcagggatctagcgggattttgcacggccgtttacggcgtgttggttcttgtttggtttcttgcgttgcgaggctagttatgtggtggggcagtgatccgccaacgctggctgaaacctccatgtatccatttgttgatatagattttcaagttagtgatggagagttcagcctgaaaatacaaagtgcttttgctcgttttccaaaccgcgagcgaaaagcgtggttagtagtctacccattgggtggaccacttgctgcaaaaggtgtgggaacctcattccaatttgccatttatttaaagggaatagaggtttctgaaccaatgcccccggttctactgccagatcatgaatatgtgtggatgcaagttaatcctcctaaccaaggggaatttacttttgatcttcctaatcatatttgtgatgtcaaagtttctggcgcaacaacattgttgcgagagaatccacttgcatgtatctttggtgcatgtggtttctttgcaggaacattgaccatgacggtagggtggtctaatcggggaggcataagtactaaagaaagtactttatggtttggcaagtgctatggagatagagttggaacaagagaaatcttggaccactgtacttttaatgcccatcaggcgggtagttgttcctatgcacttgaggtgggtgatttctctggttttcaaattccagggagtacgggcaacaaacatcaatacatttcggtgtggatggagaacgcaggttctgtatctcactttcgtattagtgttaggctccatagggggttttccttctatggtcgctcgtgtcttccaataaaatga

SEQ ID NO: 636 - DNA, 6393 bp, Tomato brown rugose fruit virus
  source 1..6393: mol_type = other DNA
gtatttttgttttacaacatataccaacaacaacaaacaacaaacaacaacattacaattactatttacaactacaatggcatacacacagacagctaccacatccgctttgctcgacactgtccgaggtaacaataccttggtcaacgatcttgcgaagcggcgtctttatgacacagcggtcgacgagttcaacgctcgtgatcgcaggcccaaagtaaatttttccaaagtaataagtgaggaacagacgcttattgctactagggcatatccagaattccagataaccttctataatacgcagaacgccgtgcattcgcttgccggtggactacgatccttagaactggaatatctaatgatgcagatcccgtacggatcactcacatatgatataggtgggaattttgcatctcatctgttcaaaggacgggcatatgttcactgctgtatgcccaatcttgatgtccgcgacataatgcggcacgaaggccagaaagacagtatagaattatacctttccaggcttgagcggggcaacaaagttgtcccaaatttccaaaaggaagcttttgacagatacgctgaaacgccagacgaagttgtctgtcacagtaccttccaaacgtgtacgcaccagcaggtggaaaacacaggcagggtgtatgctattgcattgcacagtatatacgatatacctgctgatgaattcggagcggcacttttaaggaaaaatgtccatgtttgttacgccgccttccacttttccgagaatttacttctcgaagattcacacgtcaaccttgacgaaatcaacgcgtgtttttcgcgtgatggagacaagctgactttttctttcgcatctgagagcactttaaattattgtcatagttattctaatattttaaaatacgtgtgcaaaacttacttcccggcatctaatagagaggtctacatgaaggagtttttggtcaccagggttaacacctggttttgtaagttttctaggatagatacttttttattatacaagggggtagcccacaaaggtgtaaatagtgagcaattttacagcgcaatggaagatgcatggcactacaaaaagactcttgcaatgtgtaacagcgagaggattcttcttgaagattcctcatcggtcaattactggttcccaaaaatgagagatatggtcatagttcctctattcgacatatctctcgacaccagtaaaaggacccgcaaagaagtcttagtgtcaaaggattttgtattcacagttttaaatcacattcgcacttatcaagccaaggcacttacatactccaatgttttatcctttgtcgaatcaattcgttcaagggtaattatcaacggagtgactgccaggtctgagtgggatgttgacaaatctcttttgcaatccttgtccatgacatttttcttgcatactaagcttgccgttttaaaagacgaattgttaatcagcaagtttagtttggggccaaaatcagtaagccagcatgtatgggatgagatttccctggcttttggaaacgcatttccatcgatcaaggagagactgctaaatcggaaactaattaaagtgtcgggagacgcattagaaatcagggtgcctgatttatatgtgacttttcacgatagattagtgactgagtacaaaacatcggtggatatgccagtgcttgatatcagaaagagaatggaggagactgaggttatgtacaatgcattgtctgagctatctgtgctcaaggagtcggacaagttcgacgttgatgttttttcccggatgtgccagactttggaggtagacccaatgactgcagcaaaggttattgtggcagtgatgagcaacgagagcggactgactcttacattcgaacagccaactgaagcaaatgtcgcattggcacttaaagattcagaaaaagcctctgagggtgcactagtggttacttctagagatgttgaagaaccatccatgaagggttcaatggcaagaggagagttacaattggccggtctgtctggagaccaaccagagtcttcctatactcggaacgaggaaatagagtcattagagcaattccacatggcaacggctagttcgttaattcggaaacagatgagttcgattgtgtacacgggccccattaaagttcagcaaatgaaaaactttattgatagcctggtagcatcactctctgctgcggtgtcgaacctagtcaagatcctaaaggatacagctgctatagatctcgaaacccgtcagaagtttggagtcttagatgttgcgaccaaaagatggttaattaaacctttagccaagaatcacgcatggggcgttattgaaacacatgctaggaagtaccacgttgcacttttggagtatgatgagcatggagtggtaacttgcgacagttggagaagggtggccgtgagttctgagtcaatggtttattctgatatggcaaagctcagaacactgaggagattattaagagatggtgagcctcatgtcagcagtgctaaagtcgtcctagttgacggtgtcccgggttgtggaaagacaaaagagattctctcgaaagtaaattttgaggaagatctaatcttagtaccgggtaagcaggctgctgaaatgataaagaggcgtgctaatgcgtcaggaataattcaagccacaagagataatgttcgtactgttgattcatttataatgaattacggtaaaggaacacgctgtcagttcaaaaggttatttatcgacgaaggtctgatgttgcacactggttgtgtgaattttcttgtttctatgtctctgtgcgaaattgcatatgtttatggagacacacaacaaattccatacatcaacagagtatccggttttccgtaccctgcacattttgcaaaaatagaggttgatgaggtggaaactcgcagaactacgctgcgttgtccagccgacattacccactatcttaacagaaggtacgaaggatatgtcatgtgtacatcgtcggttaaaaagtcagtttctcaggaaatggtgagcggggccgcaatgatcaatcctgtatctaagccattgaatgggaaagttttgactttcactcagtctgataaagaggcgctgctttctcgaggatatacggacgtccatacagtacatgaggtacaaggtgagacatatgcagatgtgtcgttggtcagattgactccgacacctgtatctatcatcgcaggagatagtccgcacgttctcgtagctttgtcaaggcatacccaaacattgaagtattacaccgtagtgatggatcctcttgtaagtataattagggatttagaaaaacttagttcttacttgttagatatgtataaagtagatgcagggacccaatagcaattacaggtagactccgtgtttaaaggttctaatctttttgttgcagcaccaaagactggagatatctcagatatgcaattttactatgataagtgtctcccaggtaatagcaccatgttaaataactatgatgctgttaccatgaggttgactgacatttctcttaatgtcaaagattgcatattggatttctctaagtctgtggctgcaccgaaggatccgatcaaaccactgattccgatggtacgaacggcggcagaaatgccacgccagactggactattggaaaatttggtggcgatgatcaaaagaaactttaattcaccggagttatcaggaataatcgacattgagaatactgcatctttagtagtagataaattttttgatagttacttgcttaaagaaaaaagaaaaccaaataaaaatgtttctttattttgtagagagtctctcaatagatggttagagaagcaggagcaagtgaccattggtcagcttgcagattttgattttgtggatcttcctgccgttgatcagtacaggcatatgattaaagcgcaacctaagcagaagctggatacatcaattcaaagcgaatatccggccttgcagacgattgtgtatcattcgaaaaagatcaacgcaatcttcggtcctttgttcagtgagctcacaaggcaaatgctcgaaagcatagactcaagtaagtttttgttctttacaaggaagacgccagctcaaattgaggatttcttcggagatctcgatagccatgtccctatggatatcttggagttggatatttcgaagtatgacaaatctcagaacgagttccactgtgcagtagagtatgaaatatggagaagacttggattagaagattttctgggagaagtttggaaacaaggccacaggaaaactactcttaaagattacacagctggtattaaaacgtgtttatggtaccagagaaagagtggggacgttacaacattcatcggtaatacggtgattattgctgcttgtttagcttccatgttgcccatggagaaaataatcaaaggtgcattttgcggagatgacagtttactatacttcccaaaaggttgtgagtttcctgacatacagcatacagccaaccttatgtggaatttcgaggctaagctattcagaaagcagtatggttatttctgtggaaggtacgtgatacatcatgacagagggtgtattgtttattatgaccctttgaagttgatttctaaacttggtgctaaacacatcaaggattgggatcacttagaagagttcagaagatccctttgtgatgttgcaaattcgttgaacaactgtgcgtattacacgcagttggacgacgctgtgagtgaggtccataaaaccgcacccccgggttcgtttgtatataaaagtttagttaaatatctgtccgataaggttctttttagaagtttgtttatagatggctcttgttaagggtaaagtcaatattaatgagttcatagacttgtcaaaatcagaaaaatttcttccgtctatgttcacacctgttaagagtgtcatgatctccaaggttgataagatattggttcatgaagatgaatctttgtccgaagtcaatttactcaaaggtgtaaaactcattgatggtggctatgtacatcttgctggtcttgtggtgacaggtgaatggaatttgccagataattgtcgtggtggtgtcagtgtctgtttggtcgataagagaatggagagagcggacgaggcaactcttgcttcatactataccgcagcggctaagaaaaggtttcagttcaaagtcgttccaaattacaacatcactaccaaggacgcagaaaaggcagtttggcaagtactagttaatattagaaatgttaaaattgctgcgggttactgtccgctgtcattagaatttgtgtcagtgtgtattgtttataaaaatattataaaactcggtttgagagagaaaattacgagcgtcacggatggagggcccatggaactatcagaagaagttgttgatgagttcatggaagaagtcccgatgtctgtaaggcttgcaaaatttcgttcgaagaccggaaaaaagtttagtagtaaaagtgagaataatagtggtaataataggccgaaaccagacaaaaaccaaaggaaggaaaagggtttaaaagttagggttgagaaggataatttaattgataatgaattggagacttacgtcgccgattcagattcgtattaaatatgtcttacacaatcgcaactccatcgcaatttgtgtttttgtcatcagcatgggccgaccctatagaattaataaatttatgtactaattcactaggtaatcagttccaaacacaacaagctagaacaaccgttcaacggcaatttagcgaagtgtggaaacctgtccctcaagtcactgttaggtttcctgacagtggttttaaggtgtataggtacaatgcggtactagatcctctagttactgctttgttaggagctttcgatactagaaataggattatagaagtcgaaaatcaggcgaacccgacaaccgccgaaacgttagacgctactcgtagagtagatgacgcaacggtggctataaggagcgctataaataatttagtagtagaattggtcaaaggaacaggtttgtacaatcagagcacatttgaaagtgcatccggtttacaatggtcctctgcacctgcatcttgagataatcgagatgcttaaataacagattgtgtctgcaaacacacgtggtacgtacgataacgtatagtgtttttccctccacttaaatcgaagggtagtgtcttggagcgcgcgggacaaatgtgtatggttcatacacatccgtaggcacgtaataaagcgagggattcgaattcccccggaacccccggaggggccca

SEQ ID NO: 637 - DNA, 11519 bp, Celery latent virus
  source 1..11519: mol_type = other DNA
aaaatttaaatttatgagcaagagaatatatacgattattgttgttttgtgctttcaggtttgctttcaaaatctccgaacacagcctacacaatcttcacataccttctcaacaaatccggcgatccccggtaccgacgctcttcaatttgaagaaaacgcaaacttaacttactctaccataaaatacaatattttaaagtttaatttaaattacaaacaatcaatcatgtctgtggtctctttcgggtcaatcacgagcatggacttcgatgctgcatgtctagcagctatgatcgaaacccctggtggctctattccaccaactccacaatcaccacccacttcaccagtggcggtgaaacaaaggaaaattttaaattttccaattgccaaaatcaggacaactcctgatgcatcttttgagatgtgtgtgaagttccccgagagcttcattgattccttctgtgctcaagcacagaaagaattaaaatattggcacgctgctattacgcagttgaaattctttggtggtgagacaccaaagactcttgaaaccttggtgaaccaaggtcaagctcacactcaccaagttattttaaacttggttaaaatccttgatagtgctccaaaagcaattcaaggaaagaaggagttggaaaatttcttccagctgagcccacatggaaacaattccaaagaaccaattgacgttagtcgaaaggtttatatggaaccgtgcaaaataagtccacgcaagcgacaagtgtgctcctgtgacaatgacgatgatgcacattatcattgttactattgtgatattgtgtgttcaagcaaaaatctattgcaagaacacgaaagggatttttgcgaggatgcacagtcagtgcaagcatttgggtataaacttgagagtccaaatgtctttgacccaccccatgtgacgcagcaaaggagtgttgcaccatctttgggaaaaactttggaatctcctgtgaaatctccagagcagtcaaagccaaacctggagaaaagtttcccactagtggaatcttccaccaacagtggcatgatcttctttggatcaatagctaccatggttccgtctcatattgaaaaatatgtgaggaattgtgaaactgagaatccgattgatgcagctgcatcaaatttggcgatgcaagaagctaaaagctctggcgctccttgtatagtagtgcatcataaggcactaccaggtggaaagaaagattttctttttcctcataactctcctcaagttgtgagaactgaaaccgaagagccaattgctggtaccattgatagaccaacaataaaacgtgctttatttacccgcattaagaagaaagcacaagaaatttgtgtgaacccagggggaaccatccagagaaaaacaaagcgatggttgcggccagcggaagttgcacaaattgtgcgagctacctctgatccacaacatccattgttcaaggtggacgttactcaaattattgaagttgttcatcctgtttataggactgaaagaactgaagttgtgcagcaatgcataacaaggggaacgtacaaattgatgtctaaagcccaacaacggaaggcacgagcaatgcgctcagctggaatgttagtgatcactgataacccaacaacgcattgggtatctgaacctcagaaaatgctagtggtaaaggaaaaactgagcacaacaaagcatgtgaaactccggaatgttgaagtgaatgctgaatctgaaatgttttggggaactaaaacaaaggagggaccctcgaaaacagccttaaagcgctgtaagcgtaacatcgatcgcttggctcttcttgatccgcaaatgggtgagtctgcgaatggtgaatgttggatgaacacctttaagcaccatttaaaagtggggagcattgatattcttccaaataaggttcgtttaccaaaccttaggtcggcattctcacgatggatacctttggttgattatgttgaaattttgaaatttcattgtaagtcacaaccaaagcttaaaagggttgtgatacctactccagttacttatctggaaggttctagatatcacattcatgttggttatagcaagaactgctcatggattacggtcgaacaactaattaggcaattgcagactctgttaacatcatccaaatatggagaacattttaagagagcaattgttggtggtgaaccggaagacaaattcacaccagtggttcctatagttgacgtggaaactgagagagctaaatctagcttggcaaaatggacaactgcgcaacagagatatatgggatctattagaacccgaatcaactcacaagcagaaaaacataaaatcgattcggaaaaaaagatctggataccaatgaggcacgacacgatggatatgttaactccaccatatcttttcgaaaatgggctgagaaacaacgaagttcaacaagtcggccaggttcttggagattctgtagatcgtgctggaaacagttcaggtcagagttctcaatgccaacaacaaaatgtggcgcttgcatccgaaggaaacaacgacaacgtgataaacgagagcgtgcgcagcattcaaaacttagttactgccaatatgcagttgcaagagcaatgcaaattgttgctcgcctcacacgaacaagctatcatggactccgtagaacacggaaacttggagattcagaagcacgatgtagaggtctcgcagaaaccatcaacgaggaaaagcgactcacagaggaatttgcaaaaattctcattgaagaaaatagtcgcctcagaagagatgtcgagaacattgggcagaggatggagaaaatctgtcacctcaatcggtgttccaattgtgagtgcttccattgcagaagctttaaatcaagtcgttcaaaggggaaatacttcctggcttgatgtaggcatttctggaacattgttgaagcaatgtactctttttgctacgagaacttttcaagcgtattgtagctacaaattagcacgaaacgtgctgacattaaccgtgggagaattgtatgataatgtgaaatcatacatcaactctataatgggttccacagatcctgaagtgactggtttcttgtcgcaagtacgtagcgcaccttcaatggtgaagatggccattttgctcacaatgtttgctatctcggtgaaattaatgagaaaattcttcaaggtgaagaataatggaactagctttactgtaagcggagagaatgtctctgcaagccagttgcgaatctcagcacaggctcaagctcgatcaactgacaacatgaccccaactgtaaagaagctttgtagcattcttggaatgattggtttggtttgttgttgttacgatagaacaacatgggcatatcaaaaggattggatggatgcttggatcacaagtatcacatatgccggtgcatctgatagtatttgggaatcaatttcccatccatttgaaacattgcataacattgcagtgagtggaggagatcgttcaccagaaactacagctcgtttggagcgaattttggctggtgcagggttgaacgcacaagcccaagcacttgatgaatttggagcgtctagctcagtgatgggtcagacactgcaaaacatattggatgaggttgaaagtacaaatgtgtcaatcgttagtgaaatgaaagcattgccacactaccaccgaaatgccactaccttcaatcaagcggctcgtgatttagtgactgaaccagatgcaacatatcaaatgttgttaacagcagcaactggtactggaaaatcaacgcttttcccagtgcacctaaggtcacaatctcaaaagagagtcttgctgctcattcctctcgttgcagcaacacatggagtttaccagcgacttaaaagtcaaagggtgaatgatattggttaccatgctgattcaatatctgaaaacccaaatgctaaattaatcatctcaacatatggacacatgtgtgtgaaattacttggtggtcaaaacccttttgatcaatttgattatattttagctgatgaatgtcatgttgtaacactcgagactgttacagtgatatcccatttactccaacagcgagaaatggcgacgtggaaaacagttttcatgacagcaacaccattcaacaatatcacacttaatagtgttgagacagaacagcctgtaatcatgcaacagaccgagcatttccacaaccccaaaagctttgtagattttctaaaagctggcggcactgaaagagtgcaaacatatgctaagggaggctgcatcgtattctgttctacccaaaaagaaactgaggaatcagcgaaagctcttaaagcgagtggggttattgcactcttttaccatgcctctaaccgattggaatgggattcctttgcaaagaaaaatgagcgaagcatgggacaattaaatttttatctctttgctacaaatgcactagaatctggtgtgacgatccctatgaaaagttgcgttgattttgtaactaaaatgcatccagtagttggtggagataggaagactattactatggctccaacttcaattagcattcaagagcaattgcagcgtcgaggtcgagttggacgaacttgtccaggtgggtatctatacacatcagttggaaccccgttgatgtataaacttgacccagattcatccattaagtacttgttgtactgttggaagagtggtatcaaatgttataaggaagcattaaatattcctgatgaatgcacgataacattcactaaagagaaaattggtgctatttggacacatgacacaccgccagttgttacagcagccttagtggataattttggtgcagtttacaggaatgcaaacttcttcttagcatcacatcgaagaaattatgtggaaattccacatacaactgatatgattctgccctcaactctctcgacatgggagaattttgaattggatgggaatgaagtatcagatggcacacgaatgagagtaccacaaaatcatttctttttccgaaacgaaagggtccaagagagttggttgaaattgcaagctgcaattcttactgaactaactgaagcagaagccactaagaagcgagatatagttatcgagaatctgatggcgcgtcgagtatcgggccatcctgcttcgaagcttgaaatagctagaatgataatggccaaacaacaagtggtacaacaagcaagagacacgaaacgtgttcgagaaacccttagtgagagtatatctgattactccggcatcttctcaaacttttctggaatattttcagttcaagaaagattgaaaaaggcttctatcaaggctaatgaggaattagatatggttattcaggaaaatgaatcccatattttatttctacaagacatgataaaagaaactcctgagatcatccctgatatggctttagaggagcagatccaacatatggaatatgcaaaagccatattggaaaatggttggatcagtgggaatcctcaagcaaagcttctcattatgcgcacaacgcataaaaattttcatgatcttgttacaaaaaccaaggatgggacctatcgcatgaaatcatatgtgcaacgcatgttcgattttgtgaagaaacatccattgttaatttttatgtccattatgatgggaacgtcattagcagcaggatacttcatgatgagtaaagactctgaagatgacgatgcaatagtgcaggacaaggttttcaaacgcaatgataaggcaatgctggaatggtgcttgagaggcaaagcatgtaaatgtgacgccacacacttcgaggcacagtatgtacttgattcacgtcattatagaactattctcgaagattgggtaaagttcccattgcgagggttccacaatatacaaatagtaaactatggcacagtgagcaaatatgcacgtgctctagctttcctatcagtttgtgcactcttagctaacccgactatggtgtataatagcgcagcacattccatggctggaaatagtgagtataatgagtcagtagcaaaatccctaatgcacaatattctaagagattggaatagagtcccgctcatagacttattggtaaaagggatagatggaagtgatgatcgttatgatcagtacatacatgaattatatacaagtggaggcctaattgcatttgaatcagacactggaaagtttgaaggaaaaatgtctattagtcaatatcgaaaggatgctgctaaaggacaaacaaaacgtagtgcagcttcacggtcacgtgaagaagatcattatgatccgagatcatcaggtcgactcaagagtgggatcagacgagcatatcgtcaattctataatattgaagattctgatgtgcaggaaattatcctcacaaacaagaaaggagctccaattcttaaaattgggagtcttgatgaattgaaccaacatgttgatcttctaaaattctcagatccagaattgtatgagttgtatttacatgctcgagataaattggatcttgacgaacctgaaagttcaagcggcttcactggaaagtggggtgactatgcggaagatgatgaattcatgaagatgatatcagctttagattcgttaacaaaacaagcttcggaggaagcatttataccagttcaagtgaaacttcgagatgggcgaactgtccaggcaaatgtcgcacgttattggcaaaaagattatccaactggaaaatctgtgaagcaatgggctcaaactacttgggctccaccacaattcacagctcttcgagaaagggtaggaaaagctcttgaactgattcctgaatcgcgaccaattcatcttcatggaaaagtcccaaatggaacacttatagagttccaagatgcaatgaaagatctgcacgagaagacagcagtcaaggctgtagctgaggctaaaatcggagatactcaatttgaggcggatccttctgatgtaacaagccgggttggtgtggttatggtgaaaacatcagcaaacgctgaatgggaatcatggaaccaatgtgttgctttgaataacatagtgatttttccccatcattacacgcttaaagatggtaataatttgagattcaagttttcatcaagtgatttcgaaagcacctgtcacattgtggatgggtacaatgggcttgacatggcttgggctccaattaacgttaaaattcgtggtttgaagaagaaagtttgtttaggcacgccgcggaatggatcttacctatggcatttttccatgattaatcaagggaaagatttgccagaggctcgtcttatgggatactcctctgtaacgaaagtacaagaagagtcgcacccatccttcgattggacacatacagtctcaacgcaagttgggaactgtggtggaccctttgttgataaacatggtgtcattgttggatatcacactggagcttttcaattgggacaatttaatactttcctgggattatcagcaccactaattgcacatctgacaaaattggatgtcaaaccaagtgcccagccccaatcaaagatgatttggagggaagtggatttttatcgatcaccaaattacttacccccaaccattaataaccaagagccaattccagaggagtggagatatccagaaggtaaatctgtttacccatgtgttgatccaggatggatgggttctcgtttggtgaagggatcaggttttcgtctcattggaaaaatgcaacgtcatgtggaatattcaacgaagatttcccttaatgagcattttgacatgtggatgtctcaagagaaaactcaaaatgagttaactaggctgaacaaaaatcgtgtagagaaagggttagagaaagctttcatcagtcacacgatagcagctcagaacaaggaagctgcaattaaagatacgagcaagtatgctagaacaacgttgggaacatattcagaacctttgttgaaaagagcgactgctctgacaatccaaatgctcgaggagcatattaagctatgtaaacgccaaccactggatttagtctatggggatatggaatggaacacagcatgtggagcccagtacaatggattgaaatcagcatttagggatcaagttgttggcatcgagaatatggatgcttatggtcaatactgctgggagcgtttcaacgttccaaccgatcaatacaaaccatgcatttggacaaattcattgaaggatgagttacgaccaattgaaaaagtgaaggagaataaaacgcgcactttcactgcagctccaatcgagtttgtaattggtgctaaacaagctgttgatgcattcaatcatcaattcatggatgcacatttgaagctaccacataccgttggtattaaccaatggtcagggggttggcacaaactatacaagaagttgtatggtaaaaactttgtgtactcaagtggagatggaagccggtttgactcaagtccgtgtttctatatgttcgatgccttgtacacaatacgtacatattttgcagatcctgaaatacaccaggttctggagaatatctacttggaggtttgtcacactccaatagtgttacacgatgggaatgttgtgatgaagaatcatggaaacaatagtggacaatgttctactgttgttgacaatagtctcattatgatgattctatgttgcgcctcttatctagagcacactccagctaccatgcattccctcgatgcaataaaaagccattggcatttttgtgtgaatggagatgattatattggaggaatgtcaccattgttagcaagccatttgactaaagagaagatggcaaaaaccttcagtgacttccagttcatatatgagtggtctgattattcaccatcattatttgaacaagattatatgagtttaaaattcataaacattgttgaacgaaaaggacaaacaactggacaacagttaattgctccatggcgtgaagcatcacgacaactctccactttggctcacacatcaagtggtgcacctgaaatcaaattacaagttgctctaaccgagagggtgaaagcatgggttgataaagatttatttgatttcataacagaatactgcagatggctcgtggagtatttcgatagatttacgaacacgcaagcatggaatgaagctaagaagttatggtgggatgaacaacaaattttcaaccattatttcagttttgaaagcatttgcaatgcgccatactcacaaattgtaaacgaaactcctgatgagttctttgctaatggtgtgagagagtcccgaccattgcgaatcctacgcgatggcatcaaatttggtgttgctgttacagcagctaattatctgggaccaagcgatcacgatgtacccatgattgcaaacacaatgcttaatgttgccaagataggtctcgcaaattcaacagccgagcggattgaccgtatgctatttgggaaggaaaaccctgaacatagtagagcggattcgctagttgttgtaaaaacagagcaaacagatgcgacgatctgtttgcgaactcactgcaaatgccaagcacagcacttcgatgggaaatatgagtgttgggtgagttccccatctgttgctataaaaatgtttgcaacattaaagccccggattctttccacaacgaaatttgttggagttaagtttctaccaaaaatactaagagctcatgtatgggccttatacctatctggattctcttgggaagaaacaatgcaaattgtgcaaagtcactaccctggcgagaaacagcaaagaaaagcggattggttcctacagcaactgctgaaagagctagtattgatattcaaagtgaaagggtcgaagtttattgagttgggagagcatgctcaagttcaagggaaaactcaactcgactctacacaagttgatatggatccaaattttaatgctgcagcttatgctgcaactcttcgaggaggaccgcactggggtacacataattcccaaggtctgtttgatgctattaaggtattaaaccccaatgcagcaaatgttgacattgggaatgcgcgaactgcggttcagcgcgagatgcagcggttgatagctgccgatgctccgcgacaacaaccaccaccacaagttggtggaggacaccaacaaccacctccagctggaggtcaaacgcaaggccagcctggtggttacacaccgagccaggcatttaccaataaatttggtaatataatggctgagcccgatgcccccctcgtgctcgactctcaagcaacaatgagggaagttgcccaaattgaggcagcttgggctcgtcttctagaggtgcaatctctagagggtcttggttccttctggaactacatgttttcctatgtgggaaacaatggcacctcatctggaggtgatcccagggattacatccctgcaggaaatgggcgagttacacttgcccaactaaagtccaaagctcaaggtgagcaatggcgacgttattggcgtagtcatgcgtcagacatgagggatttcttgaggcttcttcaagcttcagatagacctttgcctattcgttgggcaagaaacaatggcattaaagatgccaattacgagattgcattcgattttgcggatgcactcccagatctctcagctgcacaaatgtcaattattttagcagctaagaaccttgccgtaaggcgaggtcaaggccagatgcttaatgctggcaccaaggttggaggtcggtcaagaaccgaaacctatgaccaggctgtccgcgatgctgcggatgtccaattcccaggagcataattttattatgcaacacaacactctttttgactggggggtgatgtgtctggacttgttacagtctttttctttttcaagtgatgtggaatggaccttgaatcaaataacatttgattttggattcacatcattaatcttcaatagggtggatggccctccccttttggagtcgtacaggacgtatcctgttttatttagtaacatagcaataaacacaaaccaccatgtagatagccgtttcagtggtttggttgtgtgtttttcatttctgtcagaaaacttccaaaaatacaaaaatataaaatttttattttgtcattttggttcgttgggcccaagcgtcttgcatagcatgtcgttcattcctgaaacgagtcccccgatagtttcacaattagtgtaccggacaccttttaaaatcattttcacactttgtgatgaatttgtaaggcgtgtgcgcgtgaaaccgtggtttggacctttggaaagaggctacgctctgtaggtagttttcgatagaaaatggtttcccttaaggaaactgttttgttactttggagttccggcccccaaagtaaatttt

SEQ ID NO: 638 - DNA, 6552 bp, Black grass varicosavirus-like virus
  source 1..6552: mol_type = other DNA
cgccaatttcaaccctcccctacttccgattgtgatttttcatcgcatcgagacacccacaggtacagggtcctagtgtctctaacaccaactagaattaatggtattgattttatgtactaaattgtcatctgttctacaggagagacggcagagtttcccaagcacaagcgagatcaaggccacgcataagctcgacaacagagcgtgcaacatcacaagctcataaagctcaatggatactctggagcacgctgaagccaatgagctagaagacgatgattactttcttcctgacgaaggacctcttcatgatatgcacttggctagtgcaatcaacttggatcagatacaggagttgatgtatccagggactataaagtacaagatagatattccctattatttaagggatgagtacatgctgatagaaagtttgtgcaaaggagacaagatcaaaatggagcttggaatgttggctccatctttgaaactgtccaagcctggaggagaattgtcaaccatggatttacctgcatataaagaaataggaaaccttgtctgtcaggctttgaggaatagggacatcatgattcctatctccatgaatgatgtggcgctgaagctcccaggagtaatagtctacaggtcatggggtatagcatttgcagaattgttgaagattatatgcacaagagcagaagtgatgaggggagggtctcagcctgtatatcaaggcactggaattgaagcaggtgcagcacattgtcagtttcaagtcaacggcaattggtaccagatcgttgcgaggaagaatctctcaacactatatgacaggcaagagaatgtaatgtatataggaaatatacactcattgcttttgctaatggataccatcggacagaggatttgtttaatggttgccaatcagatagcagaactttatgatacacctggatgggttgatcaaggaaaaattgaccaaatattatcaactggagatgacattctggaagaaatgggaaatgatggatatgaaacaattgctatgtttgaatctcttgttataggaaaggtgttgagagcaactcccgatgacatcacagaatgccataagtttttgtacaactgtatggatgaggtagaaaacatgctactaaactctgctatgagaggaagaatcattgaacttgttcacagatggttggccatatttgacagtttatcgatcaaagagttatcaaatgtcttttgcttatatcgatgttggggacacccggttgtaaatatctatgaagggatggagaaagtttacgacatcggcactgaagagaaagaagttagcccatgggtagcaactgacatattgtgtcagttcagaaaaactttcttgataaattattacgagaagcatcactactatccaaacgtcttgatatcagaagaggtagaaaactcatatgttgctcaatgcattaagaagggttcttcaatagaggagatgtatcctacttatgatactaaggacttcttgggaatcgaaatccagaagatatgggacattccaataacatttgacctttgtcacattcttaatgataaagcagtatctccgaaccagaaggagctaacagacagtgttgtcaggtaccaaaacactacaggaggtcagaacagaagagggctccttagatggttgagaggaaagagcttaaactgcagagagttccttcgggagatagatcagaacgggctccctgaggatgagtgtatcattggaatgtacgagaaagagagagaaatcaagatcaaagccagaatgttttctctgatgtcagaaaggatgagatattacttcgttttgacggaagaccttatagctaagcacgtgctggagctatttcccgcaataacaatgaaagattcacaaaatgtactccaaaagaaattttggaccgttggcggaatgggaaaagactccacattcgacgttaatatcaacatcgatttttcgaagtggaattcgaacatgaggaatgaattaactcaacccatgttccaacagttggataagatcttcggatataccaatttgatatcaaggacccacgagatatttgaatcatcgtttgtatattcatcttcaggcaagtatgttcccactgtaaagtttggaaaactccaagaggatcctcctatggcatatcgtggacataagggaggctttgaagggttgagacaaaaaggatggactgtagctacagtatgtgccttatctgcaattgctgagagaagaaatgtgagaacaaaactgatgggacaaggagacaaccagatagttagaatactgatgcccacccagagatggaaatcaaatgagcttactatcaaagaaatgatccaaaatgccaaacagatccaaaaagcctttgtaaccgatatggagagaacatttgaagaggctaaattgcctatcaaggtgagagagacttgggcttctacgagactatttatgtatggaaagatgatcctacatgacggagatgcgatgccccaatggttcaaaaaagtgctgaggtcatacgctctaaccaatgagggtcaagtcactgtagcaggggtggtaggaactattgctactaacatggcttcagcggcaggattgagtgaaatgcctgatgtcatgtatctcatatttgtagcaatgactgagtggtcgctcggttacttgttagagtaccacccattcacacggaaatgcatcctaagagaacatgagtaccatgtaaagatccccggagcacatagaggaagagattatagggtgaggtcagttaacaagagaagattggtagtttctatgatcctgataccaacggcagctggaggaagtgtaacagttcctctccctggattcattatgaggggattccctgatcacgcctcagaggcttatgcctggatcaagatgcttgcggaagtaaagagtccatacaaaacaatgttaaagaactggtacactttcatcgggaatgattctatccaacctgatatgttgatccagagcccgtcatcaatcaacttcttgaagccgccaacacccagctttcaagggagaatgaacgtaagagagctcttattgtctggagaatttgatcagaaccagttcatcaaagaagcaggaacaatattgggagtctttgacaggaagaaggtctgctctgcgatgttaacagacccaatgaaccctttcataacctcagaggtttattccacttatgcccatgtgtacatagacggagtgataaaaagagtagaaaacaccagtactatcaagaagttggcccaaaaggtgaaaaccaagactcaagtcattaaggcaatgatgtacaatgaacataacttcatcatgttcataagttggagagcaatgaaaagaggtaccatcgactatgattgtgcaacccagcaagctagaatggctaggaatattggttggggaagaacaattactggtgtgaccacacctcatccagtagaattggggattggtcatatatgtaaaggtagacaagatgaatgtcctccaacggattacatttatgtcagaataaatgaaaagggagaatttgtcccttatcttgggtcaagaatcaagtgtaaagtcgtatcagagcaagatatagatgccagaagagagccactgattgctgtgggttcgcgtatatgcaggtactcgtcgtggcttggaattggcccaaatctgatggaaattgttgagaaaaacctagctgttgtctgtgacacatctgtctatgacaaatttatagacgatgatccaaagggactgttgtcatcaggatctattgatcatagattcactccagcaggagcatctgagggagttttcatcaactatgcaccacagattggttgtaatgtgtacatgtcgagcgattgtatgccgacctatggaagaggccagaccaactacactttgcacttccaggctctatattgttggctgcaatacatctcatcaaggagggctgaaagtgtattcatgcatcatcacatagagtgtgaagattgtgtcgtaccaactactgatgaagtccccgacatccagtgcccctttccctatttcgataatatatatcccccaagagtaagggacagcatatcaagagccttgggattcattgataggaaaggaggactagatattatgagcaatgtaagatcattgtgtcatgaagctgaaccaggcatgtttgatgttagacaattgcaaaagggagtgatgtggacactagcaataaagatcggatttcgattgtaccatgggggattattcgggtcagatgataccagagttgaggaccttcaggagtatcccaggatttactcatataaattatacagagataccttactggtcaatgtggcacatgtgatgatgatgcttgcagccatagagatggataaggcacctgatggtgaggaactcgcaaaagtcagaagaagagcaactgataaactgttgtcgaaacccattggaagcttcaaggggttaggaggattaactctaggaaggactgatgagaatccagataacagtcatttgtttatgactggctcattcccagaaactgtattctcaatattgaatacttccaagactgcattaatagagacaattggtcagattggacgcttatccatcgaaggaatgggccatcttcctgtggccaaaggttctctgtccaataagcagtttcgatttctgataatgatgagatgtttgttagaatgcaggaactctcattactttcaacactttcagaagatcccagaggacgaaccaggacatccagcggaccctcaaaatgacgtttatagaatgcttgtcaaaactcccgttctagatatgagtctagacaagatggtcaaatcacttgctgttattaacgaaagaaagactcttccgataatcgaatggaataacatctccttcgaatcaacagaagtgatctgcaggacaggaactcccaggtccatattcatcggaaatagaatgatcgttgagcaaaatagtagaagagagtacagagaagtaactcttccaacatctagcatttacaagtgggctgggatcttgtttcacaaacccttgaaaagacatatcattgtgttgggagatggaacaggaggaacctcactgttggtgaaaacattcaatcaagactctacagtgtacccttgctcctatttagaaacccataagattattccccaagatatggaatgtttaatgcctcaattgtctagaggatatgagggaatctccgggcgagttttgttaaatgttccagatgatatcaaggatcctctctggtcagaaagaatgtctagtgagataaatgacatgggcgttgaaaggacctctatagtctgcgatatagagaccgttgggctatgtgttctccttgatgcattcaggagtttacctcaaggagttcaagtagttatgaaaacctatgccaaagatatattgactaatatcatgtcaataatgggcttgaatcaggtagaggtgggattttctccgcatctgaaccagagcaaccatgaagtgtttctaatgggacacatctcacagaattcttttccagatcctgacatgatgatcaatcaaatggtaaagctttatggtaaggtgagagctgatccaagatccagaatcctggaggaaatgaggatgataaacaaagtattcaagccattaaagaatacgtctgtgtctctatctctagctcatataaataatctgggaattactatgaccagggagatattacaactggatggacttgagatctggggatatgcactgcaatttgtaaatcgtcattatgttgacccatctcatagagcatttcttgctgacaagaaaacgatgaacaggaaaagaaagagagatttgacaagggcattcaggatattgctaggagtggttgtgaatccaggatacctggatataaaacgcaaatggggtattagaactcccaaggaattcaaaccaagaggaatgaaccttatactagccagagattgtgatgatatgggtgtcaaattaaccaagaaggacaaattggcctctgaatgccttcattgcttttggaccaggaagatgaggaaagctcctctagatgcaccagatccaccgggggaagattggatggaaagtgcaacaagagttcgatcatttgccagcagtttatctgagcactcttctcatgattacatcaatgtcattgagacagagtagtaagttgttagtttccgtttgatgaagatggccagcagggtagaagaaaaaactatcaaacttggatacaagcagcagatcttatataaaacatagtatcattcgtaattattgcaccagagatgaatctaaatggcgaccctgtgacctatagcgtcattgataacgcggtcagattgcacgtggaacgcagcacgtatgggtttatgtttgaggcatgt

SEQ ID NO: 639 - DNA, 11988 bp, Maize suscal virus
  source 1..11988: mol_type = other DNA
caggagtgagtttgcgtctcggttaacgttgttgtagccgtttgagagacaacgtatcgattccaacgccatattcttctcatactcatcaatctcacttgtcctctgtccgcccagacaccaacacaatcgaacatttcctctgatggctgaacagattaatcacgcagctccgcccaggcgacagccaagatggggtgcttcagctatgtcgaacttcagggtaaagacgaaagatctggctacacctgactctgcaaacactccggcccacatgattgggggcgattctcttcagctggtcttcacagataaagaagcccttactggtagattctttcttacatgcctgactctcgccaatgatgaagctgttactgcaccgcagacaatagcctactatttgtctgccatggctattgtatttccttcaatgaagcctgatgcccaggactggattaagcacgcaggttatcgtgttgagctagtagagactgaagaagatctggctgagatggaagaaatccaaccatggaggccaactccagagctagctatgatgtttgggcagtctgtcttgattgtgttcaagaatatctctgctgcaaattatctgacgtacatcagaagcagagtgaaggcattaaaagcccatgtgggtgcgttttctgattctattgatggtggagaagtcttcagtctggctaaagcaatggttatcagagctgcacttggaaacaacgtggagttcaagaagaaaatactgaatctcatgctggccactcgcgaagtcgctggagcttttccggcagcttgcaattatgtgtgtggaatcctggaatggaatgagatgacggcgattgtcatcatatacaagatgctacttctcaccagctcgccggtcattaatgataaggagatcagagatgaggtgcttcacctggctgttgcgtatgaaaagatcaaccaatttgagtatccccagtactttcgcattatggcttccaggagtagagcaagggtcctagagaggcatcactatcaggtcctcaccactgtcgctcaagtggcccagaaggaccagacaccatctcttgcccagtttgttgccagtgttcctgaaaacaatcttactgtgattcggctggtcaatatccatcgtcgtttcctggccaggactgcagaagacatacatctgaaggctgcagcattcctcactgcagttgaagaagaagatgttgatgaagaactccctcctcgtgcttgattaggacagtgaggttatacccaacagacatctaagctggtctctgcgatggtctttggcggctgagcgcctttttgtttttggtctacctcatgctttctcttttgctcttggtggtgagcagtcatctattagtctgtgagtcgttggttaatgtctcagtctttaatgctactagaaaaaagtgagaaacgacgaacttgaaagaaaaaatggagcggaccagcaagctagagcggctcattgcgtctagaagtctctcattcggagaagctttgatcgctcaatctctactaaactgtgcaggtcgagatcacttcatgtcatgtctgggagacactgagattgtgtttgtctgtaaccaaggagttgacccatctctggtgagaagactaatcaccaattgcaccaagaggagtgttgtgcttccatttcgcttacttgagttggccacttgctcgatactcacatccgcgggttatgcagcagcaactctctgtagtttaatcaacaaaatcctagctgggcgtgaaaacaggtttcttggagtgatgtacatctcatctggcattaacttcaacggcttctcatctccaggtgttttggcatggaccctccagtactgcggaccgctgatggtgagatctcaaagcgccagaaagacgcttggtctagtgttcgttgactcccaggtgtacagaacttccacagcctgtgtctttgtagactgccagtgggaagaagagattctgagtctaaccacagtcatcgaacgagtcaactcacataccatgaattatctgagttctgttgaaggcaaagctattttcaagcgtgctgccctagctgtttgcgcctatttcaatagtgctgcagactggtgaaggtcctggtgtaggtgaataaagtaagaagatagaagactgtgcacatgtaggagattcccctaataagggtatgtgtgatatttgcatgtctaggtagactgaatgtattgtaagtttgtcgtgcagcccacagccaacctctgatggcagcttgttgtctaactttgagccttcttggcagttggactaagaaaaagtgagagaccaagcgattactgtgtttctcaaccttgcgaaaaccggagctagttgacagcacgcgtgagttcaaggcgcaaactgcaatggcgagcggaagtgggctttcaggtcttacgagtgaaggtgtcgaaagcagaggaactagtggggatttggaagagctgccaggaggagggctgtccagagaagaattcgccacaggaggacaaaatttattggacattgctactcaagaccctcggtttgaccaggtcagggcacaatttgctgacggtgacgatgaagagggagacgtccctaccaatgaaaacacgttcgtgttcgggaccttttctgggtctccatctgccacccagcatactcaagccagggtcagatcaaatccagtgtttaaaaagaagagtggaggtgcaaatccatctgcaagcagcagctcagcaccggtacctccggtcgcagggaacccttttgggtcaccgcagccatcctcaggattgcctgctcagcaaccgcagctagcacaacagcccccaatgagtgcggctgctgcagcaattgccaagatggaagagcagatccacgcaatggtggctcaagtggattccactttgccacacggctacccatcggtggagtcagtcacgactgacactgagcggctcgctgcaatgatagctgacactccttatctttgccttgagacaattgattcgaagcatgttgtggcagctggaccatgggtcgtcaagataagctctgcccagctcaccctctctgcatatgaccagctgatcttgtctatcgctgggaggtactattcttgcttaccgatggcaccagcagatgatctcacagcacgatttttgcacatctgctcgcgatacggaggaggagaccaattcagatcgcaagaggtcgatgtggggctgaatgcttactggaatgaactgtcaagcgagggagttatccatctgccgactcttgcttccaaggttctgcttactggtgaagctatcgcggcacctcactattcagattctatgactctcgcagatctgaccaagagtttagatgaggtctggcaagtatatccaccgattcggacagtttataacatgtgctaccaagttgcccatgaaggattaaagtttgttagtcctcttcatgatgccttcaggtttaatgatgctgcggctttttatgtggaccggatagcttgcggttctgactatattcgattggagcatgttgtcattacaccaagggcatccaacctccaattcaaacaacctgaaatgcctttagttgtcccggtggcaaacccgccaccagaagcggccacaggagcaggagacatagctgcgcagacagcagctgcaactgggctggtctctgaaaggcgcagaaattctgcaagaactggagctgcaacttcaggcgccactgtgccgggatctggcactggtgcttctttagccgctgtcaatcaagacccagcgcagcctacccctgctgaccctcatagtttgctgaaccaagggttgcctgcacggcagccacctgtgcgagacacctcgaccttcagagatggtgtagtcgacttcaacggtgttttggttaaagttcatcagttattgtcaaaccaggcctcccaagatgcaaagttagaccttattatgcagaggctcagcaacattgaagccatggtggatggggttgacaaggcatttgctgcagtgataacacgccactcccgccaggatctgactcaccgccagacagtcaacagcactctgctccagccaagttcttcagaggcccagaatctcgccagcgggtctactccccctgctccacctcagaccaatcaggtccttgaaatcctaaagatcctggaaggaggtcatgccgacgagctgacccttgagctggttgctcggttgaaggctcttattcttgagaccggaaataccagggccgctcagaacatcaccattgagtcgatcaagtttgagaatgctaggaagaggactgttcagaggatcaaaagtctcttccaccttaactaagtgatgacctggtcagggtgtgggaattgctgtttcactaagcaatgactggtcaaataaatcagtttgagtcagtcggtcctaggtcgtgagccaagtgggtcaagtcagtctagttcctcagttcaagtcgtcgagtcttgggttatgctttggcagcccttcaaaaactagaaaaaagtgagagacttgagaataactttgccatcgtcctcctgcaacagctgagcgcactcttctcgccatggagacctttctagatgaacaatttgatgatatgctatctgaatttgagcaagcacggctgtctcggtttccagcctcacatcacagctcggctttaacatattatcctcaacgccatattctgtcattaatgtctccaaactgtcctgtgaaaccaactccccttctgcgggcatactgtgatgcggtcaataaagtatctgatctcttggggggtgggtgtgatgccacagacaacccagctccagtatactcttatatcttctctcagacaacggcttcttcgccagcctattatgacccagactatgaggatccatacctgctggattccctgcgagcagcctcagatgctgtgcttgaagatattgaagctatagaatctcatcatccgggtttttcgctggataaccagaagttgcgactgctgcggaaagtctcttcacgtctccatgcttcctgcaaacagatatttgcggtgcgaagaatgttagaaaaagttagaaatcaaatccagaaatgtcacatcggggttgatcacaagcttatgccagcagtgagattaggaaatttgagtatacacactgttagagatctcatcttcgtagccggactgcaaccattccccatgcgcatccatatactaaattacgatcagtggctaatgatctacgacacagtctgttgccgtgcaatggtaaaggtggcaactttatggaacgaggaattacgcactgacaatatcccttcatgggagatcgtgtcctcagtttataaatggggcgacgcacttttaaccaactatggtgtctcagcgtatgctattataggagaatttgaatcaatagtgactggtgtcttaattacgttttctgacactgacacactaggacttggtgcctcatttgtcaactcaataatggagaacgcgcaagagcaaagcagagcttataatatacctgcgaatgagacattgaagctgatatcattgcttagaactgttgagtctgtgaactggctgtcagagttgttcggtttgagaaagcattggggaaatccaatggtggacgcgcgagcatcgggaaaagcagttcaggagaaggtagatgaggtattgccagttaaagggactgcacttgtgaaattattggcatctttcaacaggatggttacactgtcattcatctctcagcatgggcaatggccggacggttactacctctcgaactcaagagactgcccgctgaaaagagccttcgaatcacggtctacccgtatcccagagactgtggaagggcatcgtcatgaagactgggcatgctttgtgtttctacccaactgcattttagactcatatgaagatgacctggcattaatatcagataaagctgtcagtgtgtaccgcgaacacttagattcagtctatgtgcgggctctctgtaataagcagagtcagggcacggttgaggaagacagaaggttgatgttagagtacttgaggaaacagcatatgccaatactggatattttcaaaatagtaatgacagacgcagtgccgccccgatggatggccaactgtgctagcatgaaaggaacagaaatgaagcacttgaaggcccgaatttttgcggtgcttacatatgagatgagacagtactttgctgcgtcagaagacatactgaagaacaacttatttaagtataacccgcatcagactatgactatgtcagaaacagagctattgactcgactaaaatcattaactactcaattggatccaaacagtcaaagccggcagctgagtgtaatccatattgttgatttttcgaaatggaatttgagaatgagatacactaatacatgcttggtattcaaatctatagacgatttcttaggaactccaggcttgtttgagaattctcatccactcttcagtgatatgctcaacatggtttcagacccattcaatcctccagcgttaggagtagaagagacagaatctgacactatttggagaaatcatcacgcggggtgggagggtcagcgtcagaagggatggacaatcttaacatctgcactcttgtctgacctggagagaacaaccggagttcatagtgaaatatgcggccaaggtgataaccaggcactactaagcaaatttcctgtccccactatctataggaatccggaagaatggatcaagagtgatcctacggaggttaggaaggtgcttgacgacttctatttgagattagaaaaggaatgtgaagctgtaggtctgaagataaaaacagctgagacctgtcgaagtctttgttttttcaactacgggaaaagactctatttcaaaggcagtgaactatccatgaccctaaaacggttctcaaaaaacataacccagcctaatgactcatacccaacaacagaggctattcttaagacatatgagggttcatcttatgcagctggcctttatagccatccaagtctgctgccatactggatgagtaaattctctgtagcccatcaattattcaacagcttcactaacaaccagctttgtgcagaagccccagtacagatgatgtccacctttgggttcccgatcaactaccgactgatcagcacgttgatgaagatcccagcatctctaggtggcccacctcagcagtgtctggctgattatctgctacgcggccatccagatccactatgcactgatttagtcgggttgacattgaagtcaaaggccgggtgtgtgatctctaagaagataattcgtctagctcaatctggtaaatggtttagccaacgcactctgaccagagattccctaatcaaatctccttattctctgaacctcagggtcccattatcagttcgacaaccaattgaagaggctgtgctcccggctgtgcgagctcactgcaacaataacttagtgaaatctctatttgatagctcgatggatgacgacgagagatatattcttgactctttaggtcttatgaagccgttccatccgctcgtggccaacgatatttattcaaggactttaccaggaagaagacagatgtttatatcaggactggcgaataccacgagcttaggtcgcctgattaaagggaattctgcgtttcctctgatctacaaagtcatggatttggagatggagcagctaaaaagctggatagtccagctaacagagcttctcggtttacctgataatgatgatattattcttcctcatcatatattagcgcaacagctgcgcgagaaatcgtggaatacagtcattgagggcataacagttccacatccgttagaacagttcatgcttactctatcaaaatcggacgtctgcaccaacgactgttatacagtagaacctgagcatattgtattggttcaacactccgaggatgtggttgtgtctcccggtgtggaccgtgaccacatcacagcagcgcggtcaaagaaagggagcccctatcttggcagccatatcggagaaggcattgtacagaagcagcttatttgtctaaatccagatacttcctggagagatgtcattagactaaacactatcaagcgttgggtggctccagaggggtctaggctgaggttgtttatgaatggaattataagctcgcggactaacatatctcgtgcctacatagatctcgccacaggcgttccgagtagattgtcttacaaccaccgggccagcctgatggggtcaataaacagctgctctatcagttcgaccacaaacatgcacacaaggttgtacttatcctcgaacagaatgggagattattctcatggtttgaaaaattatcacatgcctttcgggcccacctttctctgttatcagacgctcgtctgcttgatcgggatcttttcacctgagaaatgggcattccctagaaatgtttatcatattcatgtcagagactctagggtgccgccggtgtacgatggcgggttagagctagaagacctaactgtccttgatctgaaaggacacccgcctaccatccttaggtgcttagcctccaaactggtattcgaagcagcaccaggatatgcatcgttcggattttggtgtgagttcgaaacagcatcgaggactgatgcgaaatatgggtatgcccaacagctgacgggtggtttgttcattcaggagacggttgtaagagaatctataacacacgacaggattgggagctttgcatcgagaccggctgtcatatcaattggagacatctcattgatcgagccatctctattccttcgttccatcgcctggggtatgctgttgctcgcacctatgcatctgctgcatttcagaggcaaatatgcattcaaagtttcctgcgtggaatatgtcaatcttttcagccgagctttttggtcttcatttgaatccccaatgagcaacccccgaataattaggaagctcggaaagcatgtcgcgttgatgtctagtcatagtctaggtaggctagattccggcatcatcccagctctgcagataataatcgttgaagagatgtggtgtatcatacattcgatcgccacctatttccgtcgaggaggtgataaaccgaatatcccccccatctttgccccatcgggttctgctgccctactcctcacctcacgagtgatagaaatgatggtcactatacggctagtagttgggaactgcagcatcagtaagatagtagggttcccaagagatttctcggcaaatcttatgagtgtgccgcagccaatatctgccgcagctctgatcgtgatacaacatgacttcttagaattgcagcgtcacttgaaactgccattacgggacatggtgatacccagagtgttctcaacccattacccctgggttgatatcttaaggaagactgacagtgtggaggcagacgatgaagacccgcagaggcaattagtcctcccagtcgactttccgcagtgtgctaatgtagtagaatttcgtatccctgagaaccctgtgttggagactactccacaatgtgactgtaaaacgacacaaagaaagagagatttacatgatgaatgtttcttttcgctgagtgggaactatagcaaatcccacctcaaaattctggagttgatcttttcgttccacctgcctatagcaaatctctgcgtgcttggctctggcactggttctgaagcatgtgcgttaagtaattatctggactgcagacaggtttatgtgaattgctaccacaaactaactgacttctccccgcatgctgcttccacttatgttccgcctgcattcaggtctgatggtatagtgactaagctcgtctctccagcctctgctgtcctaagtctgtcagatctcacggacatcaggactgcggatgctatatatcagcacttaagaggtattgctacaactggtatcatttgcgatgcagagattccaagtgcagcaactcctttactctactcacagataatgcatacaatagtggcagttgtgaggaagaaagcctctatcaactgggtgttaatcaaagtgccgatcttctgtgttcataagcttcttggcctggcagctccactagctcaggccttccatagaatcatctttgcttatccagacttcgggaagcctcattcaagtttggtctatattgtcgctactattcgggctaaggcaactccaattgaagagaataggctgcctactgtaatgcttgaagacgagatgctcagagagatgttggcctctatcagcagtcagaaccattgtagattatatgagatgagggtagcggatagaataagtcggttaagccttaatctaacccttcctcaaagcttgactgtggcttcgaatcggtttgtgcaaggcctgatcctcactgaagacgaaatctccgacccggaacaagttataaaggtactgaaggctgtgaggcaagggttgttgacctcagcacagaaagtagttgaaactcatttccgagttcataatgaaatcacaatgccgaggtcagctgtcctctctgcggatttaggaacccttcacggacagttaaacaacacatacctgaaagtcgctaaatgtgatctgctgttagagctgttgcaccttattcatcctaccctcgaacagatcaagaatcgtgtgtacagctggttggctacagcccactcgtatagaatgagaaacaggaacttcaatgtctacatcaaccagaccagatttatatcacatgattctagatatttattcgaaatccttggacatcttatgaaaagatctgttcccacagttggactccccatccatatggattaccatttattcggatctaggacactgaggcctaagcaacttattgttccttgcccaataggcgtatgtcgaagtccatcaggtagaactagcaaatggaagtggcagaaacgaagtgagatacttggttgggcaatctcattaaccctcacaaatttaccgatagcagttgaggatcataatagcttttcgctggatttcctacacgaaaaaggcatcttagaagatgttcgcatgatggcctcattaaacccatcccgcatagaggtcccttacttctttaggcccaatgagatggccctcgatttgttggcgcatgaccggttgttccttgttgcgccgttgaattctttctcactactcagaagccgttacacaaccgttgagccatactttgttccttggtcgggggcccctttagcttggtgtctattttatctggaggagcggaaccaaattgatagcctgattgtggatgagatctgccttgatgatactctgtcggtcaacacttatgtcgacacagacagcatgtcctgtagatgcctgagctgcaaaacggaagaagtcttgggagagaggttttcgttaaataccaacgatctggatttcctgtgttctcttggatctatagagacagtctatgattctgagcatgctttgtaggggcttatcgctcgcagggactaataaaaagtgagtatgtgtaagctgagccaaagactgtatcgccagttttatctaaaagtttattgtgaacttaatttaaagttcctatctgttcccatttaataccattaagaatgtggtcccagctcacctcttgtctagtccaattaagctgcagattgtgttgggtatgacataggacatatgggagtgacaaagttgaggtaataggagaataaaagtggaatcgacagtagtatcggcttgtacaacgttgagcgagacgcaaactcactcctg

SEQ ID NO: 640 - DNA, 76 bp, Tomato brown rugose fruit virus
  source 1..76: mol_type = other DNA
gtatttttgttttacaacatataccaacaacaacaaacaacaaacaacaacattacaattactatttacaactaca

SEQ ID NO: 641 - DNA, 13 bp, Celery latent virus
  source 1..13: mol_type = other DNA
aaaatttaaattt

SEQ ID NO: 642 - DNA, 235 bp, Black grass varicosavirus-like virus
  source 1..235: mol_type = other DNA
cgccaatttcaaccctcccctacttccgattgtgatttttcatcgcatcgagacacccacaggtacagggtcctagtgtctctaacaccaactagaattaatggtattgattttatgtactaaattgtcatctgttctacaggagagacggcagagtttcccaagcacaagcgagatcaaggccacgcataagctcgacaacagagcgtgcaacatcacaagctcataaagctca

SEQ ID NO: 643 - DNA, 142 bp, Maize suscal virus
  source 1..142: mol_type = other DNA
caggagtgagtttgcgtctcggttaacgttgttgtagccgtttgagagacaacgtatcgattccaacgccatattcttctcatactcatcaatctcacttgtcctctgtccgcccagacaccaacacaatcgaacatttcct

SEQ ID NO: 644 - DNA, 200 bp, Tomato brown rugose fruit virus
  source 1..200: mol_type = other DNA
gataatcgagatgcttaaataacagattgtgtctgcaaacacacgtggtacgtacgataacgtatagtgtttttccctccacttaaatcgaagggtagtgtcttggagcgcgcgggacaaatgtgtatggttcatacacatccgtaggcacgtaataaagcgagggattcgaattcccccggaacccccggaggggccca

SEQ ID NO: 645 - DNA, 583 bp, Celery latent virus
  source 1..583: mol_type = other DNA
ttttattatgcaacacaacactctttttgactggggggtgatgtgtctggacttgttacagtctttttctttttcaagtgatgtggaatggaccttgaatcaaataacatttgattttggattcacatcattaatcttcaatagggtggatggccctccccttttggagtcgtacaggacgtatcctgttttatttagtaacatagcaataaacacaaaccaccatgtagatagccgtttcagtggtttggttgtgtgtttttcatttctgtcagaaaacttccaaaaatacaaaaatataaaatttttattttgtcattttggttcgttgggcccaagcgtcttgcatagcatgtcgttcattcctgaaacgagtcccccgatagtttcacaattagtgtaccggacaccttttaaaatcattttcacactttgtgatgaatttgtaaggcgtgtgcgcgtgaaaccgtggtttggacctttggaaagaggctacgctctgtaggtagttttcgatagaaaatggtttcccttaaggaaactgttttgttactttggagttccggcccccaaagtaaatttt

SEQ ID NO: 646 - DNA, 221 bp, Black grass varicosavirus-like virus
  source 1..221: mol_type = other DNA
taagttgttagtttccgtttgatgaagatggccagcagggtagaagaaaaaactatcaaacttggatacaagcagcagatcttatataaaacatagtatcattcgtaattattgcaccagagatgaatctaaatggcgaccctgtgacctatagcgtcattgataacgcggtcagattgcacgtggaacgcagcacgtatgggtttatgtttgaggcatgt

SEQ ID NO: 647 - DNA, 303 bp, Maize suscal virus
  source 1..303: mol_type = other DNA
gggcttatcgctcgcagggactaataaaaagtgagtatgtgtaagctgagccaaagactgtatcgccagttttatctaaaagtttattgtgaacttaatttaaagttcctatctgttcccatttaataccattaagaatgtggtcccagctcacctcttgtctagtccaattaagctgcagattgtgttgggtatgacataggacatatgggagtgacaaagttgaggtaataggagaataaaagtggaatcgacagtagtatcggcttgtacaacgttgagcgagacgcaaactcactcctg

SEQ ID NO: 648 - protein, 1615 aa, Tomato brown rugose fruit virus
MAYTQTATTSALLDTVRGNNTLVNDLAKRRLYDTAVDEFNARDRRPKVNFSKVISEEQTLIATRAYPEFQITFYNTQNAVHSLAGGLRSLELEYLMMQIPYGSLTYDIGGNFASHLFKGRAYVHCCMPNLDVRDIMRHEGQKDSIELYLSRLERGNKVVPNFQKEAFDRYAETPDEVVCHSTFQTCTHQQVENTGRVYAIALHSIYDIPADEFGAALLRKNVHVCYAAFHFSENLLLEDSHVNLDEINACFSRDGDKLTFSFASESTLNYCHSYSNILKYVCKTYFPASNREVYMKEFLVTRVNTWFCKFSRIDTFLLYKGVAHKGVNSEQFYSAMEDAWHYKKTLAMCNSERILLEDSSSVNYWFPKMRDMVIVPLFDISLDTSKRTRKEVLVSKDFVFTVLNHIRTYQAKALTYSNVLSFVESIRSRVIINGVTARSEWDVDKSLLQSLSMTFFLHTKLAVLKDELLISKFSLGPKSVSQHVWDEISLAFGNAFPSIKERLLNRKLIKVSGDALEIRVPDLYVTFHDRLVTEYKTSVDMPVLDIRKRMEETEVMYNALSELSVLKESDKFDVDVFSRMCQTLEVDPMTAAKVIVAVMSNESGLTLTFEQPTEANVALALKDSEKASEGALVVTSRDVEEPSMKGSMARGELQLAGLSGDQPESSYTRNEEIESLEQFHMATASSLIRKQMSSIVYTGPIKVQQMKNFIDSLVASLSAAVSNLVKILKDTAAIDLETRQKFGVLDVATKRWLIKPLAKNHAWGVIETHARKYHVALLEYDEHGVVTCDSWRRVAVSSESMVYSDMAKLRTLRRLLRDGEPHVSSAKVVLVDGVPGCGKTKEILSKVNFEEDLILVPGKQAAEMIKRRANASGIIQATRDNVRTVDSFIMNYGKGTRCQFKRLFIDEGLMLHTGCVNFLVSMSLCEIAYVYGDTQQIPYINRVSGFPYPAHFAKIEVDEVETRRTTLRCPADITHYLNRRYEGYVMCTSSVKKSVSQEMVSGAAMINPVSKPLNGKVLTFTQSDKEALLSRGYTDVHTVHEVQGETYADVSLVRLTPTPVSIIAGDSPHVLVALSRHTQTLKYYTVVMDPLVSIIRDLEKLSSYLLDMYKVDAGTQXQLQVDSVFKGSNLFVAAPKTGDISDMQFYYDKCLPGNSTMLNNYDAVTMRLTDISLNVKDCILDFSKSVAAPKDPIKPLIPMVRTAAEMPRQTGLLENLVAMIKRNFNSPELSGIIDIENTASLVVDKFFDSYLLKEKRKPNKNVSLFCRESLNRWLEKQEQVTIGQLADFDFVDLPAVDQYRHMIKAQPKQKLDTSIQSEYPALQTIVYHSKKINAIFGPLFSELTRQMLESIDSSKFLFFTRKTPAQIEDFFGDLDSHVPMDILELDISKYDKSQNEFHCAVEYEIWRRLGLEDFLGEVWKQGHRKTTLKDYTAGIKTCLWYQRKSGDVTTFIGNTVIIAACLASMLPMEKIIKGAFCGDDSLLYFPKGCEFPDIQHTANLMWNFEAKLFRKQYGYFCGRYVIHHDRGCIVYYDPLKLISKLGAKHIKDWDHLEEFRRSLCDVANSLNNCAYYTQLDDAVSEVHKTAPPGSFVYKSLVKYLSDKVLFRSLFIDGSC

SEQ ID NO: 649 - protein, 3640 aa, Celery latent virus
MSKRIYTIIVVLCFQVCFQNLRTQPTQSSHTFSTNPAIPGTDALQFEENANLTYSTIKYNILKFNLNYKQSIMSVVSFGSITSMDFDAACLAAMIETPGGSIPPTPQSPPTSPVAVKQRKILNFPIAKIRTTPDASFEMCVKFPESFIDSFCAQAQKELKYWHAAITQLKFFGGETPKTLETLVNQGQAHTHQVILNLVKILDSAPKAIQGKKELENFFQLSPHGNNSKEPIDVSRKVYMEPCKISPRKRQVCSCDNDDDAHYHCYYCDIVCSSKNLLQEHERDFCEDAQSVQAFGYKLESPNVFDPPHVTQQRSVAPSLGKTLESPVKSPEQSKPNLEKSFPLVESSTNSGMIFFGSIATMVPSHIEKYVRNCETENPIDAAASNLAMQEAKSSGAPCIVVHHKALPGGKKDFLFPHNSPQVVRTETEEPIAGTIDRPTIKRALFTRIKKKAQEICVNPGGTIQRKTKRWLRPAEVAQIVRATSDPQHPLFKVDVTQIIEVVHPVYRTERTEVVQQCITRGTYKLMSKAQQRKARAMRSAGMLVITDNPTTHWVSEPQKMLVVKEKLSTTKHVKLRNVEVNAESEMFWGTKTKEGPSKTALKRCKRNIDRLALLDPQMGESANGECWMNTFKHHLKVGSIDILPNKVRLPNLRSAFSRWIPLVDYVEILKFHCKSQPKLKRVVIPTPVTYLEGSRYHIHVGYSKNCSWITVEQLIRQLQTLLTSSKYGEHFKRAIVGGEPEDKFTPVVPIVDVETERAKSSLAKWTTAQQRYMGSIRTRINSQAEKHKIDSEKKIWIPMRHDTMDMLTPPYLFENGLRNNEVQQVGQVLGDSVDRAGNSSGQSSQCQQQNVALASEGNNDNVINESVRSIQNLVTANMQLQEQCKLLLASHEQAIMDSVEHGNLEIQKHDVEVSQKPSTRKSDSQRNLQKFSLKKIVASEEMSRTLGRGWRKSVTSIGVPIVSASIAEALNQVVQRGNTSWLDVGISGTLLKQCTLFATRTFQAYCSYKLARNVLTLTVGELYDNVKSYINSIMGSTDPEVTGFLSQVRSAPSMVKMAILLTMFAISVKLMRKFFKVKNNGTSFTVSGENVSASQLRISAQAQARSTDNMTPTVKKLCSILGMIGLVCCCYDRTTWAYQKDWMDAWITSITYAGASDSIWESISHPFETLHNIAVSGGDRSPETTARLERILAGAGLNAQAQALDEFGASSSVMGQTLQNILDEVESTNVSIVSEMKALPHYHRNATTFNQAARDLVTEPDATYQMLLTAATGTGKSTLFPVHLRSQSQKRVLLLIPLVAATHGVYQRLKSQRVNDIGYHADSISENPNAKLIISTYGHMCVKLLGGQNPFDQFDYILADECHVVTLETVTVISHLLQQREMATWKTVFMTATPFNNITLNSVETEQPVIMQQTEHFHNPKSFVDFLKAGGTERVQTYAKGGCIVFCSTQKETEESAKALKASGVIALFYHASNRLEWDSFAKKNERSMGQLNFYLFATNALESGVTIPMKSCVDFVTKMHPVVGGDRKTITMAPTSISIQEQLQRRGRVGRTCPGGYLYTSVGTPLMYKLDPDSSIKYLLYCWKSGIKCYKEALNIPDECTITFTKEKIGAIWTHDTPPVVTAALVDNFGAVYRNANFFLASHRRNYVEIPHTTDMILPSTLSTWENFELDGNEVSDGTRMRVPQNHFFFRNERVQESWLKLQAAILTELTEAEATKKRDIVIENLMARRVSGHPASKLEIARMIMAKQQVVQQARDTKRVRETLSESISDYSGIFSNFSGIFSVQERLKKASIKANEELDMVIQENESHILFLQDMIKETPEIIPDMALEEQIQHMEYAKAILENGWISGNPQAKLLIMRTTHKNFHDLVTKTKDGTYRMKSYVQRMFDFVKKHPLLIFMSIMMGTSLAAGYFMMSKDSEDDDAIVQDKVFKRNDKAMLEWCLRGKACKCDATHFEAQYVLDSRHYRTILEDWVKFPLRGFHNIQIVNYGTVSKYARALAFLSVCALLANPTMVYNSAAHSMAGNSEYNESVAKSLMHNILRDWNRVPLIDLLVKGIDGSDDRYDQYIHELYTSGGLIAFESDTGKFEGKMSISQYRKDAAKGQTKRSAASRSREEDHYDPRSSGRLKSGIRRAYRQFYNIEDSDVQEIILTNKKGAPILKIGSLDELNQHVDLLKFSDPELYELYLHARDKLDLDEPESSSGFTGKWGDYAEDDEFMKMISALDSLTKQASEEAFIPVQVKLRDGRTVQANVARYWQKDYPTGKSVKQWAQTTWAPPQFTALRERVGKALELIPESRPIHLHGKVPNGTLIEFQDAMKDLHEKTAVKAVAEAKIGDTQFEADPSDVTSRVGVVMVKTSANAEWESWNQCVALNNIVIFPHHYTLKDGNNLRFKFSSSDFESTCHIVDGYNGLDMAWAPINVKIRGLKKKVCLGTPRNGSYLWHFSMINQGKDLPEARLMGYSSVTKVQEESHPSFDWTHTVSTQVGNCGGPFVDKHGVIVGYHTGAFQLGQFNTFLGLSAPLIAHLTKLDVKPSAQPQSKMIWREVDFYRSPNYLPPTINNQEPIPEEWRYPEGKSVYPCVDPGWMGSRLVKGSGFRLIGKMQRHVEYSTKISLNEHFDMWMSQEKTQNELTRLNKNRVEKGLEKAFISHTIAAQNKEAAIKDTSKYARTTLGTYSEPLLKRATALTIQMLEEHIKLCKRQPLDLVYGDMEWNTACGAQYNGLKSAFRDQVVGIENMDAYGQYCWERFNVPTDQYKPCIWTNSLKDELRPIEKVKENKTRTFTAAPIEFVIGAKQAVDAFNHQFMDAHLKLPHTVGINQWSGGWHKLYKKLYGKNFVYSSGDGSRFDSSPCFYMFDALYTIRTYFADPEIHQVLENIYLEVCHTPIVLHDGNVVMKNHGNNSGQCSTVVDNSLIMMILCCASYLEHTPATMHSLDAIKSHWHFCVNGDDYIGGMSPLLASHLTKEKMAKTFSDFQFIYEWSDYSPSLFEQDYMSLKFINIVERKGQTTGQQLIAPWREASRQLSTLAHTSSGAPEIKLQVALTERVKAWVDKDLFDFITEYCRWLVEYFDRFTNTQAWNEAKKLWWDEQQIFNHYFSFESICNAPYSQIVNETPDEFFANGVRESRPLRILRDGIKFGVAVTAANYLGPSDHDVPMIANTMLNVAKIGLANSTAERIDRMLFGKENPEHSRADSLVVVKTEQTDATICLRTHCKCQAQHFDGKYECWVSSPSVAIKMFATLKPRILSTTKFVGVKFLPKILRAHVWALYLSGFSWEETMQIVQSHYPGEKQQRKADWFLQQLLKELVLIFKVKGSKFIELGEHAQVQGKTQLDSTQVDMDPNFNAAAYAATLRGGPHWGTHNSQGLFDAIKVLNPNAANVDIGNARTAVQREMQRLIAADAPRQQPPPQVGGGHQQPPPAGGQTQGQPGGYTPSQAFTNKFGNIMAEPDAPLVLDSQATMREVAQIEAAWARLLEVQSLEGLGSFWNYMFSYVGNNGTSSGGDPRDYIPAGNGRVTLAQLKSKAQGEQWRRYWRSHASDMRDFLRLLQASDRPLPIRWARNNGIKDANYEIAFDFADALPDLSAAQMSIILAAKNLAVRRGQGQMLNAGTKVGGRSRTETYDQAVRDAADVQFPGA

SEQ ID NO: 650 - protein, 2031 aa, Black grass varicosavirus-like virus
MDTLEHAEANELEDDDYFLPDEGPLHDMHLASAINLDQIQELMYPGTIKYKIDIPYYLRDEYMLIESLCKGDKIKMELGMLAPSLKLSKPGGELSTMDLPAYKEIGNLVCQALRNRDIMIPISMNDVALKLPGVIVYRSWGIAFAELLKIICTRAEVMRGGSQPVYQGTGIEAGAAHCQFQVNGNWYQIVARKNLSTLYDRQENVMYIGNIHSLLLLMDTIGQRICLMVANQIAELYDTPGWVDQGKIDQILSTGDDILEEMGNDGYETIAMFESLVIGKVLRATPDDITECHKFLYNCMDEVENMLLNSAMRGRIIELVHRWLAIFDSLSIKELSNVFCLYRCWGHPVVNIYEGMEKVYDIGTEEKEVSPWVATDILCQFRKTFLINYYEKHHYYPNVLISEEVENSYVAQCIKKGSSIEEMYPTYDTKDFLGIEIQKIWDIPITFDLCHILNDKAVSPNQKELTDSVVRYQNTTGGQNRRGLLRWLRGKSLNCREFLREIDQNGLPEDECIIGMYEKEREIKIKARMFSLMSERMRYYFVLTEDLIAKHVLELFPAITMKDSQNVLQKKFWTVGGMGKDSTFDVNINIDFSKWNSNMRNELTQPMFQQLDKIFGYTNLISRTHEIFESSFVYSSSGKYVPTVKFGKLQEDPPMAYRGHKGGFEGLRQKGWTVATVCALSAIAERRNVRTKLMGQGDNQIVRILMPTQRWKSNELTIKEMIQNAKQIQKAFVTDMERTFEEAKLPIKVRETWASTRLFMYGKMILHDGDAMPQWFKKVLRSYALTNEGQVTVAGVVGTIATNMASAAGLSEMPDVMYLIFVAMTEWSLGYLLEYHPFTRKCILREHEYHVKIPGAHRGRDYRVRSVNKRRLVVSMILIPTAAGGSVTVPLPGFIMRGFPDHASEAYAWIKMLAEVKSPYKTMLKNWYTFIGNDSIQPDMLIQSPSSINFLKPPTPSFQGRMNVRELLLSGEFDQNQFIKEAGTILGVFDRKKVCSAMLTDPMNPFITSEVYSTYAHVYIDGVIKRVENTSTIKKLAQKVKTKTQVIKAMMYNEHNFIMFISWRAMKRGTIDYDCATQQARMARNIGWGRTITGVTTPHPVELGIGHICKGRQDECPPTDYIYVRINEKGEFVPYLGSRIKCKVVSEQDIDARREPLIAVGSRICRYSSWLGIGPNLMEIVEKNLAVVCDTSVYDKFIDDDPKGLLSSGSIDHRFTPAGASEGVFINYAPQIGCNVYMSSDCMPTYGRGQTNYTLHFQALYCWLQYISSRRAESVFMHHHIECEDCVVPTTDEVPDIQCPFPYFDNIYPPRVRDSISRALGFIDRKGGLDIMSNVRSLCHEAEPGMFDVRQLQKGVMWTLAIKIGFRLYHGGLFGSDDTRVEDLQEYPRIYSYKLYRDTLLVNVAHVMMMLAAIEMDKAPDGEELAKVRRRATDKLLSKPIGSFKGLGGLTLGRTDENPDNSHLFMTGSFPETVFSILNTSKTALIETIGQIGRLSIEGMGHLPVAKGSLSNKQFRFLIMMRCLLECRNSHYFQHFQKIPEDEPGHPADPQNDVYRMLVKTPVLDMSLDKMVKSLAVINERKTLPIIEWNNISFESTEVICRTGTPRSIFIGNRMIVEQNSRREYREVTLPTSSIYKWAGILFHKPLKRHIIVLGDGTGGTSLLVKTFNQDSTVYPCSYLETHKIIPQDMECLMPQLSRGYEGISGRVLLNVPDDIKDPLWSERMSSEINDMGVERTSIVCDIETVGLCVLLDAFRSLPQGVQVVMKTYAKDILTNIMSIMGLNQVEVGFSPHLNQSNHEVFLMGHISQNSFPDPDMMINQMVKLYGKVRADPRSRILEEMRMINKVFKPLKNTSVSLSLAHINNLGITMTREILQLDGLEIWGYALQFVNRHYVDPSHRAFLADKKTMNRKRKRDLTRAFRILLGVVVNPGYLDIKRKWGIRTPKEFKPRGMNLILARDCDDMGVKLTKKDKLASECLHCFWTRKMRKAPLDAPDPPGEDWMESATRVRSFASSLSEHSSHDYINVIETE

SEQ ID NO: 651 - protein, 2338 aa, Maize suscal virus
METFLDEQFDDMLSEFEQARLSRFPASHHSSALTYYPQRHILSLMSPNCPVKPTPLLRAYCDAVNKVSDLLGGGCDATDNPAPVYSYIFSQTTASSPAYYDPDYEDPYLLDSLRAASDAVLEDIEAIESHHPGFSLDNQKLRLLRKVSSRLHASCKQIFAVRRMLEKVRNQIQKCHIGVDHKLMPAVRLGNLSIHTVRDLIFVAGLQPFPMRIHILNYDQWLMIYDTVCCRAMVKVATLWNEELRTDNIPSWEIVSSVYKWGDALLTNYGVSAYAIIGEFESIVTGVLITFSDTDTLGLGASFVNSIMENAQEQSRAYNIPANETLKLISLLRTVESVNWLSELFGLRKHWGNPMVDARASGKAVQEKVDEVLPVKGTALVKLLASFNRMVTLSFISQHGQWPDGYYLSNSRDCPLKRAFESRSTRIPETVEGHRHEDWACFVFLPNCILDSYEDDLALISDKAVSVYREHLDSVYVRALCNKQSQGTVEEDRRLMLEYLRKQHMPILDIFKIVMTDAVPPRWMANCASMKGTEMKHLKARIFAVLTYEMRQYFAASEDILKNNLFKYNPHQTMTMSETELLTRLKSLTTQLDPNSQSRQLSVIHIVDFSKWNLRMRYTNTCLVFKSIDDFLGTPGLFENSHPLFSDMLNMVSDPFNPPALGVEETESDTIWRNHHAGWEGQRQKGWTILTSALLSDLERTTGVHSEICGQGDNQALLSKFPVPTIYRNPEEWIKSDPTEVRKVLDDFYLRLEKECEAVGLKIKTAETCRSLCFFNYGKRLYFKGSELSMTLKRFSKNITQPNDSYPTTEAILKTYEGSSYAAGLYSHPSLLPYWMSKFSVAHQLFNSFTNNQLCAEAPVQMMSTFGFPINYRLISTLMKIPASLGGPPQQCLADYLLRGHPDPLCTDLVGLTLKSKAGCVISKKIIRLAQSGKWFSQRTLTRDSLIKSPYSLNLRVPLSVRQPIEEAVLPAVRAHCNNNLVKSLFDSSMDDDERYILDSLGLMKPFHPLVANDIYSRTLPGRRQMFISGLANTTSLGRLIKGNSAFPLIYKVMDLEMEQLKSWIVQLTELLGLPDNDDIILPHHILAQQLREKSWNTVIEGITVPHPLEQFMLTLSKSDVCTNDCYTVEPEHIVLVQHSEDVVVSPGVDRDHITAARSKKGSPYLGSHIGEGIVQKQLICLNPDTSWRDVIRLNTIKRWVAPEGSRLRLFMNGIISSRTNISRAYIDLATGVPSRLSYNHRASLMGSINSCSISSTTNMHTRLYLSSNRMGDYSHGLKNYHMPFGPTFLCYQTLVCLIGIFSPEKWAFPRNVYHIHVRDSRVPPVYDGGLELEDLTVLDLKGHPPTILRCLASKLVFEAAPGYASFGFWCEFETASRTDAKYGYAQQLTGGLFIQETVVRESITHDRIGSFASRPAVISIGDISLIEPSLFLRSIAWGMLLLAPMHLLHFRGKYAFKVSCVEYVNLFSRAFWSSFESPMSNPRIIRKLGKHVALMSSHSLGRLDSGIIPALQIIIVEEMWCIIHSIATYFRRGGDKPNIPPIFAPSGSAALLLTSRVIEMMVTIRLVVGNCSISKIVGFPRDFSANLMSVPQPISAAALIVIQHDFLELQRHLKLPLRDMVIPRVFSTHYPWVDILRKTDSVEADDEDPQRQLVLPVDFPQCANVVEFRIPENPVLETTPQCDCKTTQRKRDLHDECFFSLSGNYSKSHLKILELIFSFHLPIANLCVLGSGTGSEACALSNYLDCRQVYVNCYHKLTDFSPHAASTYVPPAFRSDGIVTKLVSPASAVLSLSDLTDIRTADAIYQHLRGIATTGIICDAEIPSAATPLLYSQIMHTIVAVVRKKASINWVLIKVPIFCVHKLLGLAAPLAQAFHRIIFAYPDFGKPHSSLVYIVATIRAKATPIEENRLPTVMLEDEMLREMLASISSQNHCRLYEMRVADRISRLSLNLTLPQSLTVASNRFVQGLILTEDEISDPEQVIKVLKAVRQGLLTSAQKVVETHFRVHNEITMPRSAVLSADLGTLHGQLNNTYLKVAKCDLLLELLHLIHPTLEQIKNRVYSWLATAHSYRMRNRNFNVYINQTRFISHDSRYLFEILGHLMKRSVPTVGLPIHMDYHLFGSRTLRPKQLIVPCPIGVCRSPSGRTSKWKWQKRSEILGWAISLTLTNLPIAVEDHNSFSLDFLHEKGILEDVRMMASLNPSRIEVPYFFRPNEMALDLLAHDRLFLVAPLNSFSLLRSRYTTVEPYFVPWSGAPLAWCLFYLEERNQIDSLIVDEICLDDTLSVNTYVDTDSMSCRCLSCKTEEVLGERFSLNTNDLDFLCSLGSIETVYDSEHAL

SEQ ID NO: 652 - DNA, 4845 bp, Tomato brown rugose fruit virus
  source 1..4845: mol_type = other DNA
atggcatacacacagacagctaccacatccgctttgctcgacactgtccgaggtaacaataccttggtcaacgatcttgcgaagcggcgtctttatgacacagcggtcgacgagttcaacgctcgtgatcgcaggcccaaagtaaatttttccaaagtaataagtgaggaacagacgcttattgctactagggcatatccagaattccagataaccttctataatacgcagaacgccgtgcattcgcttgccggtggactacgatccttagaactggaatatctaatgatgcagatcccgtacggatcactcacatatgatataggtgggaattttgcatctcatctgttcaaaggacgggcatatgttcactgctgtatgcccaatcttgatgtccgcgacataatgcggcacgaaggccagaaagacagtatagaattatacctttccaggcttgagcggggcaacaaagttgtcccaaatttccaaaaggaagcttttgacagatacgctgaaacgccagacgaagttgtctgtcacagtaccttccaaacgtgtacgcaccagcaggtggaaaacacaggcagggtgtatgctattgcattgcacagtatatacgatatacctgctgatgaattcggagcggcacttttaaggaaaaatgtccatgtttgttacgccgccttccacttttccgagaatttacttctcgaagattcacacgtcaaccttgacgaaatcaacgcgtgtttttcgcgtgatggagacaagctgactttttctttcgcatctgagagcactttaaattattgtcatagttattctaatattttaaaatacgtgtgcaaaacttacttcccggcatctaatagagaggtctacatgaaggagtttttggtcaccagggttaacacctggttttgtaagttttctaggatagatacttttttattatacaagggggtagcccacaaaggtgtaaatagtgagcaattttacagcgcaatggaagatgcatggcactacaaaaagactcttgcaatgtgtaacagcgagaggattcttcttgaagattcctcatcggtcaattactggttcccaaaaatgagagatatggtcatagttcctctattcgacatatctctcgacaccagtaaaaggacccgcaaagaagtcttagtgtcaaaggattttgtattcacagttttaaatcacattcgcacttatcaagccaaggcacttacatactccaatgttttatcctttgtcgaatcaattcgttcaagggtaattatcaacggagtgactgccaggtctgagtgggatgttgacaaatctcttttgcaatccttgtccatgacatttttcttgcatactaagcttgccgttttaaaagacgaattgttaatcagcaagtttagtttggggccaaaatcagtaagccagcatgtatgggatgagatttccctggcttttggaaacgcatttccatcgatcaaggagagactgctaaatcggaaactaattaaagtgtcgggagacgcattagaaatcagggtgcctgatttatatgtgacttttcacgatagattagtgactgagtacaaaacatcggtggatatgccagtgcttgatatcagaaagagaatggaggagactgaggttatgtacaatgcattgtctgagctatctgtgctcaaggagtcggacaagttcgacgttgatgttttttcccggatgtgccagactttggaggtagacccaatgactgcagcaaaggttattgtggcagtgatgagcaacgagagcggactgactcttacattcgaacagccaactgaagcaaatgtcgcattggcacttaaagattcagaaaaagcctctgagggtgcactagtggttacttctagagatgttgaagaaccatccatgaagggttcaatggcaagaggagagttacaattggccggtctgtctggagaccaaccagagtcttcctatactcggaacgaggaaatagagtcattagagcaattccacatggcaacggctagttcgttaattcggaaacagatgagttcgattgtgtacacgggccccattaaagttcagcaaatgaaaaactttattgatagcctggtagcatcactctctgctgcggtgtcgaacctagtcaagatcctaaaggatacagctgctatagatctcgaaacccgtcagaagtttggagtcttagatgttgcgaccaaaagatggttaattaaacctttagccaagaatcacgcatggggcgttattgaaacacatgctaggaagtaccacgttgcacttttggagtatgatgagcatggagtggtaacttgcgacagttggagaagggtggccgtgagttctgagtcaatggtttattctgatatggcaaagctcagaacactgaggagattattaagagatggtgagcctcatgtcagcagtgctaaagtcgtcctagttgacggtgtcccgggttgtggaaagacaaaagagattctctcgaaagtaaattttgaggaagatctaatcttagtaccgggtaagcaggctgctgaaatgataaagaggcgtgctaatgcgtcaggaataattcaagccacaagagataatgttcgtactgttgattcatttataatgaattacggtaaaggaacacgctgtcagttcaaaaggttatttatcgacgaaggtctgatgttgcacactggttgtgtgaattttcttgtttctatgtctctgtgcgaaattgcatatgtttatggagacacacaacaaattccatacatcaacagagtatccggttttccgtaccctgcacattttgcaaaaatagaggttgatgaggtggaaactcgcagaactacgctgcgttgtccagccgacattacccactatcttaacagaaggtacgaaggatatgtcatgtgtacatcgtcggttaaaaagtcagtttctcaggaaatggtgagcggggccgcaatgatcaatcctgtatctaagccattgaatgggaaagttttgactttcactcagtctgataaagaggcgctgctttctcgaggatatacggacgtccatacagtacatgaggtacaaggtgagacatatgcagatgtgtcgttggtcagattgactccgacacctgtatctatcatcgcaggagatagtccgcacgttctcgtagctttgtcaaggcatacccaaacattgaagtattacaccgtagtgatggatcctcttgtaagtataattagggatttagaaaaacttagttcttacttgttagatatgtataaagtagatgcagggacccaacaattacaggtagactccgtgtttaaaggttctaatctttttgttgcagcaccaaagactggagatatctcagatatgcaattttactatgataagtgtctcccaggtaatagcaccatgttaaataactatgatgctgttaccatgaggttgactgacatttctcttaatgtcaaagattgcatattggatttctctaagtctgtggctgcaccgaaggatccgatcaaaccactgattccgatggtacgaacggcggcagaaatgccacgccagactggactattggaaaatttggtggcgatgatcaaaagaaactttaattcaccggagttatcaggaataatcgacattgagaatactgcatctttagtagtagataaattttttgatagttacttgcttaaagaaaaaagaaaaccaaataaaaatgtttctttattttgtagagagtctctcaatagatggttagagaagcaggagcaagtgaccattggtcagcttgcagattttgattttgtggatcttcctgccgttgatcagtacaggcatatgattaaagcgcaacctaagcagaagctggatacatcaattcaaagcgaatatccggccttgcagacgattgtgtatcattcgaaaaagatcaacgcaatcttcggtcctttgttcagtgagctcacaaggcaaatgctcgaaagcatagactcaagtaagtttttgttctttacaaggaagacgccagctcaaattgaggatttcttcggagatctcgatagccatgtccctatggatatcttggagttggatatttcgaagtatgacaaatctcagaacgagttccactgtgcagtagagtatgaaatatggagaagacttggattagaagattttctgggagaagtttggaaacaaggccacaggaaaactactcttaaagattacacagctggtattaaaacgtgtttatggtaccagagaaagagtggggacgttacaacattcatcggtaatacggtgattattgctgcttgtttagcttccatgttgcccatggagaaaataatcaaaggtgcattttgcggagatgacagtttactatacttcccaaaaggttgtgagtttcctgacatacagcatacagccaaccttatgtggaatttcgaggctaagctattcagaaagcagtatggttatttctgtggaaggtacgtgatacatcatgacagagggtgtattgtttattatgaccctttgaagttgatttctaaacttggtgctaaacacatcaaggattgggatcacttagaagagttcagaagatccctttgtgatgttgcaaattcgttgaacaactgtgcgtattacacgcagttggacgacgctgtgagtgaggtccataaaaccgcacccccgggttcgtttgtatataaaagtttagttaaatatctgtccgataaggttctttttagaagtttgtttatagatggctcttgttaa

SEQ ID NO: 653 - DNA, 10923 bp, Celery latent virus
  source 1..10923: mol_type = other DNA
atgagcaagagaatatatacgattattgttgttttgtgctttcaggtttgctttcaaaatctccgaacacagcctacacaatcttcacataccttctcaacaaatccggcgatccccggtaccgacgctcttcaatttgaagaaaacgcaaacttaacttactctaccataaaatacaatattttaaagtttaatttaaattacaaacaatcaatcatgtctgtggtctctttcgggtcaatcacgagcatggacttcgatgctgcatgtctagcagctatgatcgaaacccctggtggctctattccaccaactccacaatcaccacccacttcaccagtggcggtgaaacaaaggaaaattttaaattttccaattgccaaaatcaggacaactcctgatgcatcttttgagatgtgtgtgaagttccccgagagcttcattgattccttctgtgctcaagcacagaaagaattaaaatattggcacgctgctattacgcagttgaaattctttggtggtgagacaccaaagactcttgaaaccttggtgaaccaaggtcaagctcacactcaccaagttattttaaacttggttaaaatccttgatagtgctccaaaagcaattcaaggaaagaaggagttggaaaatttcttccagctgagcccacatggaaacaattccaaagaaccaattgacgttagtcgaaaggtttatatggaaccgtgcaaaataagtccacgcaagcgacaagtgtgctcctgtgacaatgacgatgatgcacattatcattgttactattgtgatattgtgtgttcaagcaaaaatctattgcaagaacacgaaagggatttttgcgaggatgcacagtcagtgcaagcatttgggtataaacttgagagtccaaatgtctttgacccaccccatgtgacgcagcaaaggagtgttgcaccatctttgggaaaaactttggaatctcctgtgaaatctccagagcagtcaaagccaaacctggagaaaagtttcccactagtggaatcttccaccaacagtggcatgatcttctttggatcaatagctaccatggttccgtctcatattgaaaaatatgtgaggaattgtgaaactgagaatccgattgatgcagctgcatcaaatttggcgatgcaagaagctaaaagctctggcgctccttgtatagtagtgcatcataaggcactaccaggtggaaagaaagattttctttttcctcataactctcctcaagttgtgagaactgaaaccgaagagccaattgctggtaccattgatagaccaacaataaaacgtgctttatttacccgcattaagaagaaagcacaagaaatttgtgtgaacccagggggaaccatccagagaaaaacaaagcgatggttgcggccagcggaagttgcacaaattgtgcgagctacctctgatccacaacatccattgttcaaggtggacgttactcaaattattgaagttgttcatcctgtttataggactgaaagaactgaagttgtgcagcaatgcataacaaggggaacgtacaaattgatgtctaaagcccaacaacggaaggcacgagcaatgcgctcagctggaatgttagtgatcactgataacccaacaacgcattgggtatctgaacctcagaaaatgctagtggtaaaggaaaaactgagcacaacaaagcatgtgaaactccggaatgttgaagtgaatgctgaatctgaaatgttttggggaactaaaacaaaggagggaccctcgaaaacagccttaaagcgctgtaagcgtaacatcgatcgcttggctcttcttgatccgcaaatgggtgagtctgcgaatggtgaatgttggatgaacacctttaagcaccatttaaaagtggggagcattgatattcttccaaataaggttcgtttaccaaaccttaggtcggcattctcacgatggatacctttggttgattatgttgaaattttgaaatttcattgtaagtcacaaccaaagcttaaaagggttgtgatacctactccagttacttatctggaaggttctagatatcacattcatgttggttatagcaagaactgctcatggattacggtcgaacaactaattaggcaattgcagactctgttaacatcatccaaatatggagaacattttaagagagcaattgttggtggtgaaccggaagacaaattcacaccagtggttcctatagttgacgtggaaactgagagagctaaatctagcttggcaaaatggacaactgcgcaacagagatatatgggatctattagaacccgaatcaactcacaagcagaaaaacataaaatcgattcggaaaaaaagatctggataccaatgaggcacgacacgatggatatgttaactccaccatatcttttcgaaaatgggctgagaaacaacgaagttcaacaagtcggccaggttcttggagattctgtagatcgtgctggaaacagttcaggtcagagttctcaatgccaacaacaaaatgtggcgcttgcatccgaaggaaacaacgacaacgtgataaacgagagcgtgcgcagcattcaaaacttagttactgccaatatgcagttgcaagagcaatgcaaattgttgctcgcctcacacgaacaagctatcatggactccgtagaacacggaaacttggagattcagaagcacgatgtagaggtctcgcagaaaccatcaacgaggaaaagcgactcacagaggaatttgcaaaaattctcattgaagaaaatagtcgcctcagaagagatgtcgagaacattgggcagaggatggagaaaatctgtcacctcaatcggtgttccaattgtgagtgcttccattgcagaagctttaaatcaagtcgttcaaaggggaaatacttcctggcttgatgtaggcatttctggaacattgttgaagcaatgtactctttttgctacgagaacttttcaagcgtattgtagctacaaattagcacgaaacgtgctgacattaaccgtgggagaattgtatgataatgtgaaatcatacatcaactctataatgggttccacagatcctgaagtgactggtttcttgtcgcaagtacgtagcgcaccttcaatggtgaagatggccattttgctcacaatgtttgctatctcggtgaaattaatgagaaaattcttcaaggtgaagaataatggaactagctttactgtaagcggagagaatgtctctgcaagccagttgcgaatctcagcacaggctcaagctcgatcaactgacaacatgaccccaactgtaaagaagctttgtagcattcttggaatgattggtttggtttgttgttgttacgatagaacaacatgggcatatcaaaaggattggatggatgcttggatcacaagtatcacatatgccggtgcatctgatagtatttgggaatcaatttcccatccatttgaaacattgcataacattgcagtgagtggaggagatcgttcaccagaaactacagctcgtttggagcgaattttggctggtgcagggttgaacgcacaagcccaagcacttgatgaatttggagcgtctagctcagtgatgggtcagacactgcaaaacatattggatgaggttgaaagtacaaatgtgtcaatcgttagtgaaatgaaagcattgccacactaccaccgaaatgccactaccttcaatcaagcggctcgtgatttagtgactgaaccagatgcaacatatcaaatgttgttaacagcagcaactggtactggaaaatcaacgcttttcccagtgcacctaaggtcacaatctcaaaagagagtcttgctgctcattcctctcgttgcagcaacacatggagtttaccagcgacttaaaagtcaaagggtgaatgatattggttaccatgctgattcaatatctgaaaacccaaatgctaaattaatcatctcaacatatggacacatgtgtgtgaaattacttggtggtcaaaacccttttgatcaatttgattatattttagctgatgaatgtcatgttgtaacactcgagactgttacagtgatatcccatttactccaacagcgagaaatggcgacgtggaaaacagttttcatgacagcaacaccattcaacaatatcacacttaatagtgttgagacagaacagcctgtaatcatgcaacagaccgagcatttccacaaccccaaaagctttgtagattttctaaaagctggcggcactgaaagagtgcaaacatatgctaagggaggctgcatcgtattctgttctacccaaaaagaaactgaggaatcagcgaaagctcttaaagcgagtggggttattgcactcttttaccatgcctctaaccgattggaatgggattcctttgcaaagaaaaatgagcgaagcatgggacaattaaatttttatctctttgctacaaatgcactagaatctggtgtgacgatccctatgaaaagttgcgttgattttgtaactaaaatgcatccagtagttggtggagataggaagactattactatggctccaacttcaattagcattcaagagcaattgcagcgtcgaggtcgagttggacgaacttgtccaggtgggtatctatacacatcagttggaaccccgttgatgtataaacttgacccagattcatccattaagtacttgttgtactgttggaagagtggtatcaaatgttataaggaagcattaaatattcctgatgaatgcacgataacattcactaaagagaaaattggtgctatttggacacatgacacaccgccagttgttacagcagccttagtggataattttggtgcagtttacaggaatgcaaacttcttcttagcatcacatcgaagaaattatgtggaaattccacatacaactgatatgattctgccctcaactctctcgacatgggagaattttgaattggatgggaatgaagtatcagatggcacacgaatgagagtaccacaaaatcatttctttttccgaaacgaaagggtccaagagagttggttgaaattgcaagctgcaattcttactgaactaactgaagcagaagccactaagaagcgagatatagttatcgagaatctgatggcgcgtcgagtatcgggccatcctgcttcgaagcttgaaatagctagaatgataatggccaaacaacaagtggtacaacaagcaagagacacgaaacgtgttcgagaaacccttagtgagagtatatctgattactccggcatcttctcaaacttttctggaatattttcagttcaagaaagattgaaaaaggcttctatcaaggctaatgaggaattagatatggttattcaggaaaatgaatcccatattttatttctacaagacatgataaaagaaactcctgagatcatccctgatatggctttagaggagcagatccaacatatggaatatgcaaaagccatattggaaaatggttggatcagtgggaatcctcaagcaaagcttctcattatgcgcacaacgcataaaaattttcatgatcttgttacaaaaaccaaggatgggacctatcgcatgaaatcatatgtgcaacgcatgttcgattttgtgaagaaacatccattgttaatttttatgtccattatgatgggaacgtcattagcagcaggatacttcatgatgagtaaagactctgaagatgacgatgcaatagtgcaggacaaggttttcaaacgcaatgataaggcaatgctggaatggtgcttgagaggcaaagcatgtaaatgtgacgccacacacttcgaggcacagtatgtacttgattcacgtcattatagaactattctcgaagattgggtaaagttcccattgcgagggttccacaatatacaaatagtaaactatggcacagtgagcaaatatgcacgtgctctagctttcctatcagtttgtgcactcttagctaacccgactatggtgtataatagcgcagcacattccatggctggaaatagtgagtataatgagtcagtagcaaaatccctaatgcacaatattctaagagattggaatagagtcccgctcatagacttattggtaaaagggatagatggaagtgatgatcgttatgatcagtacatacatgaattatatacaagtggaggcctaattgcatttgaatcagacactggaaagtttgaaggaaaaatgtctattagtcaatatcgaaaggatgctgctaaaggacaaacaaaacgtagtgcagcttcacggtcacgtgaagaagatcattatgatccgagatcatcaggtcgactcaagagtgggatcagacgagcatatcgtcaattctataatattgaagattctgatgtgcaggaaattatcctcacaaacaagaaaggagctccaattcttaaaattgggagtcttgatgaattgaaccaacatgttgatcttctaaaattctcagatccagaattgtatgagttgtatttacatgctcgagataaattggatcttgacgaacctgaaagttcaagcggcttcactggaaagtggggtgactatgcggaagatgatgaattcatgaagatgatatcagctttagattcgttaacaaaacaagcttcggaggaagcatttataccagttcaagtgaaacttcgagatgggcgaactgtccaggcaaatgtcgcacgttattggcaaaaagattatccaactggaaaatctgtgaagcaatgggctcaaactacttgggctccaccacaattcacagctcttcgagaaagggtaggaaaagctcttgaactgattcctgaatcgcgaccaattcatcttcatggaaaagtcccaaatggaacacttatagagttccaagatgcaatgaaagatctgcacgagaagacagcagtcaaggctgtagctgaggctaaaatcggagatactcaatttgaggcggatccttctgatgtaacaagccgggttggtgtggttatggtgaaaacatcagcaaacgctgaatgggaatcatggaaccaatgtgttgctttgaataacatagtgatttttccccatcattacacgcttaaagatggtaataatttgagattcaagttttcatcaagtgatttcgaaagcacctgtcacattgtggatgggtacaatgggcttgacatggcttgggctccaattaacgttaaaattcgtggtttgaagaagaaagtttgtttaggcacgccgcggaatggatcttacctatggcatttttccatgattaatcaagggaaagatttgccagaggctcgtcttatgggatactcctctgtaacgaaagtacaagaagagtcgcacccatccttcgattggacacatacagtctcaacgcaagttgggaactgtggtggaccctttgttgataaacatggtgtcattgttggatatcacactggagcttttcaattgggacaatttaatactttcctgggattatcagcaccactaattgcacatctgacaaaattggatgtcaaaccaagtgcccagccccaatcaaagatgatttggagggaagtggatttttatcgatcaccaaattacttacccccaaccattaataaccaagagccaattccagaggagtggagatatccagaaggtaaatctgtttacccatgtgttgatccaggatggatgggttctcgtttggtgaagggatcaggttttcgtctcattggaaaaatgcaacgtcatgtggaatattcaacgaagatttcccttaatgagcattttgacatgtggatgtctcaagagaaaactcaaaatgagttaactaggctgaacaaaaatcgtgtagagaaagggttagagaaagctttcatcagtcacacgatagcagctcagaacaaggaagctgcaattaaagatacgagcaagtatgctagaacaacgttgggaacatattcagaacctttgttgaaaagagcgactgctctgacaatccaaatgctcgaggagcatattaagctatgtaaacgccaaccactggatttagtctatggggatatggaatggaacacagcatgtggagcccagtacaatggattgaaatcagcatttagggatcaagttgttggcatcgagaatatggatgcttatggtcaatactgctgggagcgtttcaacgttccaaccgatcaatacaaaccatgcatttggacaaattcattgaaggatgagttacgaccaattgaaaaagtgaaggagaataaaacgcgcactttcactgcagctccaatcgagtttgtaattggtgctaaacaagctgttgatgcattcaatcatcaattcatggatgcacatttgaagctaccacataccgttggtattaaccaatggtcagggggttggcacaaactatacaagaagttgtatggtaaaaactttgtgtactcaagtggagatggaagccggtttgactcaagtccgtgtttctatatgttcgatgccttgtacacaatacgtacatattttgcagatcctgaaatacaccaggttctggagaatatctacttggaggtttgtcacactccaatagtgttacacgatgggaatgttgtgatgaagaatcatggaaacaatagtggacaatgttctactgttgttgacaatagtctcattatgatgattctatgttgcgcctcttatctagagcacactccagctaccatgcattccctcgatgcaataaaaagccattggcatttttgtgtgaatggagatgattatattggaggaatgtcaccattgttagcaagccatttgactaaagagaagatggcaaaaaccttcagtgacttccagttcatatatgagtggtctgattattcaccatcattatttgaacaagattatatgagtttaaaattcataaacattgttgaacgaaaaggacaaacaactggacaacagttaattgctccatggcgtgaagcatcacgacaactctccactttggctcacacatcaagtggtgcacctgaaatcaaattacaagttgctctaaccgagagggtgaaagcatgggttgataaagatttatttgatttcataacagaatactgcagatggctcgtggagtatttcgatagatttacgaacacgcaagcatggaatgaagctaagaagttatggtgggatgaacaacaaattttcaaccattatttcagttttgaaagcatttgcaatgcgccatactcacaaattgtaaacgaaactcctgatgagttctttgctaatggtgtgagagagtcccgaccattgcgaatcctacgcgatggcatcaaatttggtgttgctgttacagcagctaattatctgggaccaagcgatcacgatgtacccatgattgcaaacacaatgcttaatgttgccaagataggtctcgcaaattcaacagccgagcggattgaccgtatgctatttgggaaggaaaaccctgaacatagtagagcggattcgctagttgttgtaaaaacagagcaaacagatgcgacgatctgtttgcgaactcactgcaaatgccaagcacagcacttcgatgggaaatatgagtgttgggtgagttccccatctgttgctataaaaatgtttgcaacattaaagccccggattctttccacaacgaaatttgttggagttaagtttctaccaaaaatactaagagctcatgtatgggccttatacctatctggattctcttgggaagaaacaatgcaaattgtgcaaagtcactaccctggcgagaaacagcaaagaaaagcggattggttcctacagcaactgctgaaagagctagtattgatattcaaagtgaaagggtcgaagtttattgagttgggagagcatgctcaagttcaagggaaaactcaactcgactctacacaagttgatatggatccaaattttaatgctgcagcttatgctgcaactcttcgaggaggaccgcactggggtacacataattcccaaggtctgtttgatgctattaaggtattaaaccccaatgcagcaaatgttgacattgggaatgcgcgaactgcggttcagcgcgagatgcagcggttgatagctgccgatgctccgcgacaacaaccaccaccacaagttggtggaggacaccaacaaccacctccagctggaggtcaaacgcaaggccagcctggtggttacacaccgagccaggcatttaccaataaatttggtaatataatggctgagcccgatgcccccctcgtgctcgactctcaagcaacaatgagggaagttgcccaaattgaggcagcttgggctcgtcttctagaggtgcaatctctagagggtcttggttccttctggaactacatgttttcctatgtgggaaacaatggcacctcatctggaggtgatcccagggattacatccctgcaggaaatgggcgagttacacttgcccaactaaagtccaaagctcaaggtgagcaatggcgacgttattggcgtagtcatgcgtcagacatgagggatttcttgaggcttcttcaagcttcagatagacctttgcctattcgttgggcaagaaacaatggcattaaagatgccaattacgagattgcattcgattttgcggatgcactcccagatctctcagctgcacaaatgtcaattattttagcagctaagaaccttgccgtaaggcgaggtcaaggccagatgcttaatgctggcaccaaggttggaggtcggtcaagaaccgaaacctatgaccaggctgtccgcgatgctgcggatgtccaattcccaggagcataa

SEQ ID NO: 654 - DNA, 6096 bp, Black grass varicosavirus-like virus
  source 1..6096: mol_type = other DNA
atggatactctggagcacgctgaagccaatgagctagaagacgatgattactttcttcctgacgaaggacctcttcatgatatgcacttggctagtgcaatcaacttggatcagatacaggagttgatgtatccagggactataaagtacaagatagatattccctattatttaagggatgagtacatgctgatagaaagtttgtgcaaaggagacaagatcaaaatggagcttggaatgttggctccatctttgaaactgtccaagcctggaggagaattgtcaaccatggatttacctgcatataaagaaataggaaaccttgtctgtcaggctttgaggaatagggacatcatgattcctatctccatgaatgatgtggcgctgaagctcccaggagtaatagtctacaggtcatggggtatagcatttgcagaattgttgaagattatatgcacaagagcagaagtgatgaggggagggtctcagcctgtatatcaaggcactggaattgaagcaggtgcagcacattgtcagtttcaagtcaacggcaattggtaccagatcgttgcgaggaagaatctctcaacactatatgacaggcaagagaatgtaatgtatataggaaatatacactcattgcttttgctaatggataccatcggacagaggatttgtttaatggttgccaatcagatagcagaactttatgatacacctggatgggttgatcaaggaaaaattgaccaaatattatcaactggagatgacattctggaagaaatgggaaatgatggatatgaaacaattgctatgtttgaatctcttgttataggaaaggtgttgagagcaactcccgatgacatcacagaatgccataagtttttgtacaactgtatggatgaggtagaaaacatgctactaaactctgctatgagaggaagaatcattgaacttgttcacagatggttggccatatttgacagtttatcgatcaaagagttatcaaatgtcttttgcttatatcgatgttggggacacccggttgtaaatatctatgaagggatggagaaagtttacgacatcggcactgaagagaaagaagttagcccatgggtagcaactgacatattgtgtcagttcagaaaaactttcttgataaattattacgagaagcatcactactatccaaacgtcttgatatcagaagaggtagaaaactcatatgttgctcaatgcattaagaagggttcttcaatagaggagatgtatcctacttatgatactaaggacttcttgggaatcgaaatccagaagatatgggacattccaataacatttgacctttgtcacattcttaatgataaagcagtatctccgaaccagaaggagctaacagacagtgttgtcaggtaccaaaacactacaggaggtcagaacagaagagggctccttagatggttgagaggaaagagcttaaactgcagagagttccttcgggagatagatcagaacgggctccctgaggatgagtgtatcattggaatgtacgagaaagagagagaaatcaagatcaaagccagaatgttttctctgatgtcagaaaggatgagatattacttcgttttgacggaagaccttatagctaagcacgtgctggagctatttcccgcaataacaatgaaagattcacaaaatgtactccaaaagaaattttggaccgttggcggaatgggaaaagactccacattcgacgttaatatcaacatcgatttttcgaagtggaattcgaacatgaggaatgaattaactcaacccatgttccaacagttggataagatcttcggatataccaatttgatatcaaggacccacgagatatttgaatcatcgtttgtatattcatcttcaggcaagtatgttcccactgtaaagtttggaaaactccaagaggatcctcctatggcatatcgtggacataagggaggctttgaagggttgagacaaaaaggatggactgtagctacagtatgtgccttatctgcaattgctgagagaagaaatgtgagaacaaaactgatgggacaaggagacaaccagatagttagaatactgatgcccacccagagatggaaatcaaatgagcttactatcaaagaaatgatccaaaatgccaaacagatccaaaaagcctttgtaaccgatatggagagaacatttgaagaggctaaattgcctatcaaggtgagagagacttgggcttctacgagactatttatgtatggaaagatgatcctacatgacggagatgcgatgccccaatggttcaaaaaagtgctgaggtcatacgctctaaccaatgagggtcaagtcactgtagcaggggtggtaggaactattgctactaacatggcttcagcggcaggattgagtgaaatgcctgatgtcatgtatctcatatttgtagcaatgactgagtggtcgctcggttacttgttagagtaccacccattcacacggaaatgcatcctaagagaacatgagtaccatgtaaagatccccggagcacatagaggaagagattatagggtgaggtcagttaacaagagaagattggtagtttctatgatcctgataccaacggcagctggaggaagtgtaacagttcctctccctggattcattatgaggggattccctgatcacgcctcagaggcttatgcctggatcaagatgcttgcggaagtaaagagtccatacaaaacaatgttaaagaactggtacactttcatcgggaatgattctatccaacctgatatgttgatccagagcccgtcatcaatcaacttcttgaagccgccaacacccagctttcaagggagaatgaacgtaagagagctcttattgtctggagaatttgatcagaaccagttcatcaaagaagcaggaacaatattgggagtctttgacaggaagaaggtctgctctgcgatgttaacagacccaatgaaccctttcataacctcagaggtttattccacttatgcccatgtgtacatagacggagtgataaaaagagtagaaaacaccagtactatcaagaagttggcccaaaaggtgaaaaccaagactcaagtcattaaggcaatgatgtacaatgaacataacttcatcatgttcataagttggagagcaatgaaaagaggtaccatcgactatgattgtgcaacccagcaagctagaatggctaggaatattggttggggaagaacaattactggtgtgaccacacctcatccagtagaattggggattggtcatatatgtaaaggtagacaagatgaatgtcctccaacggattacatttatgtcagaataaatgaaaagggagaatttgtcccttatcttgggtcaagaatcaagtgtaaagtcgtatcagagcaagatatagatgccagaagagagccactgattgctgtgggttcgcgtatatgcaggtactcgtcgtggcttggaattggcccaaatctgatggaaattgttgagaaaaacctagctgttgtctgtgacacatctgtctatgacaaatttatagacgatgatccaaagggactgttgtcatcaggatctattgatcatagattcactccagcaggagcatctgagggagttttcatcaactatgcaccacagattggttgtaatgtgtacatgtcgagcgattgtatgccgacctatggaagaggccagaccaactacactttgcacttccaggctctatattgttggctgcaatacatctcatcaaggagggctgaaagtgtattcatgcatcatcacatagagtgtgaagattgtgtcgtaccaactactgatgaagtccccgacatccagtgcccctttccctatttcgataatatatatcccccaagagtaagggacagcatatcaagagccttgggattcattgataggaaaggaggactagatattatgagcaatgtaagatcattgtgtcatgaagctgaaccaggcatgtttgatgttagacaattgcaaaagggagtgatgtggacactagcaataaagatcggatttcgattgtaccatgggggattattcgggtcagatgataccagagttgaggaccttcaggagtatcccaggatttactcatataaattatacagagataccttactggtcaatgtggcacatgtgatgatgatgcttgcagccatagagatggataaggcacctgatggtgaggaactcgcaaaagtcagaagaagagcaactgataaactgttgtcgaaacccattggaagcttcaaggggttaggaggattaactctaggaaggactgatgagaatccagataacagtcatttgtttatgactggctcattcccagaaactgtattctcaatattgaatacttccaagactgcattaatagagacaattggtcagattggacgcttatccatcgaaggaatgggccatcttcctgtggccaaaggttctctgtccaataagcagtttcgatttctgataatgatgagatgtttgttagaatgcaggaactctcattactttcaacactttcagaagatcccagaggacgaaccaggacatccagcggaccctcaaaatgacgtttatagaatgcttgtcaaaactcccgttctagatatgagtctagacaagatggtcaaatcacttgctgttattaacgaaagaaagactcttccgataatcgaatggaataacatctccttcgaatcaacagaagtgatctgcaggacaggaactcccaggtccatattcatcggaaatagaatgatcgttgagcaaaatagtagaagagagtacagagaagtaactcttccaacatctagcatttacaagtgggctgggatcttgtttcacaaacccttgaaaagacatatcattgtgttgggagatggaacaggaggaacctcactgttggtgaaaacattcaatcaagactctacagtgtacccttgctcctatttagaaacccataagattattccccaagatatggaatgtttaatgcctcaattgtctagaggatatgagggaatctccgggcgagttttgttaaatgttccagatgatatcaaggatcctctctggtcagaaagaatgtctagtgagataaatgacatgggcgttgaaaggacctctatagtctgcgatatagagaccgttgggctatgtgttctccttgatgcattcaggagtttacctcaaggagttcaagtagttatgaaaacctatgccaaagatatattgactaatatcatgtcaataatgggcttgaatcaggtagaggtgggattttctccgcatctgaaccagagcaaccatgaagtgtttctaatgggacacatctcacagaattcttttccagatcctgacatgatgatcaatcaaatggtaaagctttatggtaaggtgagagctgatccaagatccagaatcctggaggaaatgaggatgataaacaaagtattcaagccattaaagaatacgtctgtgtctctatctctagctcatataaataatctgggaattactatgaccagggagatattacaactggatggacttgagatctggggatatgcactgcaatttgtaaatcgtcattatgttgacccatctcatagagcatttcttgctgacaagaaaacgatgaacaggaaaagaaagagagatttgacaagggcattcaggatattgctaggagtggttgtgaatccaggatacctggatataaaacgcaaatggggtattagaactcccaaggaattcaaaccaagaggaatgaaccttatactagccagagattgtgatgatatgggtgtcaaattaaccaagaaggacaaattggcctctgaatgccttcattgcttttggaccaggaagatgaggaaagctcctctagatgcaccagatccaccgggggaagattggatggaaagtgcaacaagagttcgatcatttgccagcagtttatctgagcactcttctcatgattacatcaatgtcattgagacagagtag

SEQ ID NO: 655 - DNA, 7017 bp, Maize suscal virus
  source 1..7017: mol_type = other DNA
atggagacctttctagatgaacaatttgatgatatgctatctgaatttgagcaagcacggctgtctcggtttccagcctcacatcacagctcggctttaacatattatcctcaacgccatattctgtcattaatgtctccaaactgtcctgtgaaaccaactccccttctgcgggcatactgtgatgcggtcaataaagtatctgatctcttggggggtgggtgtgatgccacagacaacccagctccagtatactcttatatcttctctcagacaacggcttcttcgccagcctattatgacccagactatgaggatccatacctgctggattccctgcgagcagcctcagatgctgtgcttgaagatattgaagctatagaatctcatcatccgggtttttcgctggataaccagaagttgcgactgctgcggaaagtctcttcacgtctccatgcttcctgcaaacagatatttgcggtgcgaagaatgttagaaaaagttagaaatcaaatccagaaatgtcacatcggggttgatcacaagcttatgccagcagtgagattaggaaatttgagtatacacactgttagagatctcatcttcgtagccggactgcaaccattccccatgcgcatccatatactaaattacgatcagtggctaatgatctacgacacagtctgttgccgtgcaatggtaaaggtggcaactttatggaacgaggaattacgcactgacaatatcccttcatgggagatcgtgtcctcagtttataaatggggcgacgcacttttaaccaactatggtgtctcagcgtatgctattataggagaatttgaatcaatagtgactggtgtcttaattacgttttctgacactgacacactaggacttggtgcctcatttgtcaactcaataatggagaacgcgcaagagcaaagcagagcttataatatacctgcgaatgagacattgaagctgatatcattgcttagaactgttgagtctgtgaactggctgtcagagttgttcggtttgagaaagcattggggaaatccaatggtggacgcgcgagcatcgggaaaagcagttcaggagaaggtagatgaggtattgccagttaaagggactgcacttgtgaaattattggcatctttcaacaggatggttacactgtcattcatctctcagcatgggcaatggccggacggttactacctctcgaactcaagagactgcccgctgaaaagagccttcgaatcacggtctacccgtatcccagagactgtggaagggcatcgtcatgaagactgggcatgctttgtgtttctacccaactgcattttagactcatatgaagatgacctggcattaatatcagataaagctgtcagtgtgtaccgcgaacacttagattcagtctatgtgcgggctctctgtaataagcagagtcagggcacggttgaggaagacagaaggttgatgttagagtacttgaggaaacagcatatgccaatactggatattttcaaaatagtaatgacagacgcagtgccgccccgatggatggccaactgtgctagcatgaaaggaacagaaatgaagcacttgaaggcccgaatttttgcggtgcttacatatgagatgagacagtactttgctgcgtcagaagacatactgaagaacaacttatttaagtataacccgcatcagactatgactatgtcagaaacagagctattgactcgactaaaatcattaactactcaattggatccaaacagtcaaagccggcagctgagtgtaatccatattgttgatttttcgaaatggaatttgagaatgagatacactaatacatgcttggtattcaaatctatagacgatttcttaggaactccaggcttgtttgagaattctcatccactcttcagtgatatgctcaacatggtttcagacccattcaatcctccagcgttaggagtagaagagacagaatctgacactatttggagaaatcatcacgcggggtgggagggtcagcgtcagaagggatggacaatcttaacatctgcactcttgtctgacctggagagaacaaccggagttcatagtgaaatatgcggccaaggtgataaccaggcactactaagcaaatttcctgtccccactatctataggaatccggaagaatggatcaagagtgatcctacggaggttaggaaggtgcttgacgacttctatttgagattagaaaaggaatgtgaagctgtaggtctgaagataaaaacagctgagacctgtcgaagtctttgttttttcaactacgggaaaagactctatttcaaaggcagtgaactatccatgaccctaaaacggttctcaaaaaacataacccagcctaatgactcatacccaacaacagaggctattcttaagacatatgagggttcatcttatgcagctggcctttatagccatccaagtctgctgccatactggatgagtaaattctctgtagcccatcaattattcaacagcttcactaacaaccagctttgtgcagaagccccagtacagatgatgtccacctttgggttcccgatcaactaccgactgatcagcacgttgatgaagatcccagcatctctaggtggcccacctcagcagtgtctggctgattatctgctacgcggccatccagatccactatgcactgatttagtcgggttgacattgaagtcaaaggccgggtgtgtgatctctaagaagataattcgtctagctcaatctggtaaatggtttagccaacgcactctgaccagagattccctaatcaaatctccttattctctgaacctcagggtcccattatcagttcgacaaccaattgaagaggctgtgctcccggctgtgcgagctcactgcaacaataacttagtgaaatctctatttgatagctcgatggatgacgacgagagatatattcttgactctttaggtcttatgaagccgttccatccgctcgtggccaacgatatttattcaaggactttaccaggaagaagacagatgtttatatcaggactggcgaataccacgagcttaggtcgcctgattaaagggaattctgcgtttcctctgatctacaaagtcatggatttggagatggagcagctaaaaagctggatagtccagctaacagagcttctcggtttacctgataatgatgatattattcttcctcatcatatattagcgcaacagctgcgcgagaaatcgtggaatacagtcattgagggcataacagttccacatccgttagaacagttcatgcttactctatcaaaatcggacgtctgcaccaacgactgttatacagtagaacctgagcatattgtattggttcaacactccgaggatgtggttgtgtctcccggtgtggaccgtgaccacatcacagcagcgcggtcaaagaaagggagcccctatcttggcagccatatcggagaaggcattgtacagaagcagcttatttgtctaaatccagatacttcctggagagatgtcattagactaaacactatcaagcgttgggtggctccagaggggtctaggctgaggttgtttatgaatggaattataagctcgcggactaacatatctcgtgcctacatagatctcgccacaggcgttccgagtagattgtcttacaaccaccgggccagcctgatggggtcaataaacagctgctctatcagttcgaccacaaacatgcacacaaggttgtacttatcctcgaacagaatgggagattattctcatggtttgaaaaattatcacatgcctttcgggcccacctttctctgttatcagacgctcgtctgcttgatcgggatcttttcacctgagaaatgggcattccctagaaatgtttatcatattcatgtcagagactctagggtgccgccggtgtacgatggcgggttagagctagaagacctaactgtccttgatctgaaaggacacccgcctaccatccttaggtgcttagcctccaaactggtattcgaagcagcaccaggatatgcatcgttcggattttggtgtgagttcgaaacagcatcgaggactgatgcgaaatatgggtatgcccaacagctgacgggtggtttgttcattcaggagacggttgtaagagaatctataacacacgacaggattgggagctttgcatcgagaccggctgtcatatcaattggagacatctcattgatcgagccatctctattccttcgttccatcgcctggggtatgctgttgctcgcacctatgcatctgctgcatttcagaggcaaatatgcattcaaagtttcctgcgtggaatatgtcaatcttttcagccgagctttttggtcttcatttgaatccccaatgagcaacccccgaataattaggaagctcggaaagcatgtcgcgttgatgtctagtcatagtctaggtaggctagattccggcatcatcccagctctgcagataataatcgttgaagagatgtggtgtatcatacattcgatcgccacctatttccgtcgaggaggtgataaaccgaatatcccccccatctttgccccatcgggttctgctgccctactcctcacctcacgagtgatagaaatgatggtcactatacggctagtagttgggaactgcagcatcagtaagatagtagggttcccaagagatttctcggcaaatcttatgagtgtgccgcagccaatatctgccgcagctctgatcgtgatacaacatgacttcttagaattgcagcgtcacttgaaactgccattacgggacatggtgatacccagagtgttctcaacccattacccctgggttgatatcttaaggaagactgacagtgtggaggcagacgatgaagacccgcagaggcaattagtcctcccagtcgactttccgcagtgtgctaatgtagtagaatttcgtatccctgagaaccctgtgttggagactactccacaatgtgactgtaaaacgacacaaagaaagagagatttacatgatgaatgtttcttttcgctgagtgggaactatagcaaatcccacctcaaaattctggagttgatcttttcgttccacctgcctatagcaaatctctgcgtgcttggctctggcactggttctgaagcatgtgcgttaagtaattatctggactgcagacaggtttatgtgaattgctaccacaaactaactgacttctccccgcatgctgcttccacttatgttccgcctgcattcaggtctgatggtatagtgactaagctcgtctctccagcctctgctgtcctaagtctgtcagatctcacggacatcaggactgcggatgctatatatcagcacttaagaggtattgctacaactggtatcatttgcgatgcagagattccaagtgcagcaactcctttactctactcacagataatgcatacaatagtggcagttgtgaggaagaaagcctctatcaactgggtgttaatcaaagtgccgatcttctgtgttcataagcttcttggcctggcagctccactagctcaggccttccatagaatcatctttgcttatccagacttcgggaagcctcattcaagtttggtctatattgtcgctactattcgggctaaggcaactccaattgaagagaataggctgcctactgtaatgcttgaagacgagatgctcagagagatgttggcctctatcagcagtcagaaccattgtagattatatgagatgagggtagcggatagaataagtcggttaagccttaatctaacccttcctcaaagcttgactgtggcttcgaatcggtttgtgcaaggcctgatcctcactgaagacgaaatctccgacccggaacaagttataaaggtactgaaggctgtgaggcaagggttgttgacctcagcacagaaagtagttgaaactcatttccgagttcataatgaaatcacaatgccgaggtcagctgtcctctctgcggatttaggaacccttcacggacagttaaacaacacatacctgaaagtcgctaaatgtgatctgctgttagagctgttgcaccttattcatcctaccctcgaacagatcaagaatcgtgtgtacagctggttggctacagcccactcgtatagaatgagaaacaggaacttcaatgtctacatcaaccagaccagatttatatcacatgattctagatatttattcgaaatccttggacatcttatgaaaagatctgttcccacagttggactccccatccatatggattaccatttattcggatctaggacactgaggcctaagcaacttattgttccttgcccaataggcgtatgtcgaagtccatcaggtagaactagcaaatggaagtggcagaaacgaagtgagatacttggttgggcaatctcattaaccctcacaaatttaccgatagcagttgaggatcataatagcttttcgctggatttcctacacgaaaaaggcatcttagaagatgttcgcatgatggcctcattaaacccatcccgcatagaggtcccttacttctttaggcccaatgagatggccctcgatttgttggcgcatgaccggttgttccttgttgcgccgttgaattctttctcactactcagaagccgttacacaaccgttgagccatactttgttccttggtcgggggcccctttagcttggtgtctattttatctggaggagcggaaccaaattgatagcctgattgtggatgagatctgccttgatgatactctgtcggtcaacacttatgtcgacacagacagcatgtcctgtagatgcctgagctgcaaaacggaagaagtcttgggagagaggttttcgttaaataccaacgatctggatttcctgtgttctcttggatctatagagacagtctatgattctgagcatgctttgtag

SEQ ID NO: 656 - DNA, 7954 bp, Horseradish latent virus
  source 1..7954: mol_type = genomic DNA
tggtatcagagccatgagtattgaaaaatacataagatcttcggatcaatataacccaataacaaggttatacgaggtatatacgcatataccccggatcggcagcgtagagatacgttttgctaagtcatctacatacggtgtagaggacacatccgctaggatgagcatgtatactgccatcagatccgtttgatggtgcgcgtactaagtataactaagttatataattgttgaaaaacaaaatggatttatatccaaccaaagaggaagatacccctcaaaatcaaactgagaaatacgttttctcaaaagaagattcatctggatattcggctgaattaatggtcaataatgacttattaaaaactatttctaaaactaaattaactttagaaaaagaaaaagtttttagaatgacaaatcctttaacctcaatggttaaaagcctgtgtcagagaaagaaccacatattctattgcgtaactacgaaagagttatcaatagatatttgtgaatcttcaggtaaagtctacttacctcttctaacaaatgaagagataaatgggcgattaaccaaagtcgatccaaggatcagacaaacactctctattgttcatataggtgcagtgaagatattgctcaaagcgcaattcagaaacgggatcaactctcccgtcaaactcgctctcattgatgaccgaatcaatgaccgaaaagactgcctcctcggagcagcaagaggtaacttaaactacggtaaatttatgtttaccgtttatccaaaatttggtgtaagtttaagaactaaaaggttaaatcaaaccttaagctttattcatgaatttgagagaaataatttaatgaataaaggagataaagttatgaccataacctacttagtagcttatgcactaacaaatagtcatcacagcatagactataaatctagttctaatattgaattagaagatgttttccaagaaattggaaacgttgaacaatccgaattttgcattattgaaaatgaagattgtaattgggcaattgatattgcacaaaacaaagctgaattgggtaaaactaaaaagcttatatctgataatcaattaaaaattgaatcaggagaatctagtaatggtgaattacatagattaaatgaaagcgttaataaattacgcgaaaaatttgtagaaatttgtgggtagaatgagtgatctcaccaaacttccacacatctacaagaaaggtgaaacgatagttcgtttaaagccactggcaataaacaagaacgatcgggtatatgtgtttagctccgctaaatccaatatacaatcaatcaccaactccttgaataatctcaatgagattgttgggagaatactccttgggacttggaaaatcaattcattttttggattatccaaagatccctcagagtcaacctcaaaaaacccatctgtttttgataatgctaaaaccatttttaagagtgggggggttgataatacagcgttactaaaagaaatcaaaacccttttagaatcgcaaaacactaggattaaaaacctagaaaaccaatcgaaatccttgacggataagattgaacctgaacctttaaccaaggatgaggtaaaagacttaaaagagtcaattaggtttatccgagataagttgaaagacataatcggataaaactggcgaatctaaatcagattcaaaaggaagtatcccaagccttagaagagattaggtctctaaaaaaggatacagaagccattctagcaaaattaggatcaaccgaacctaacaacctagaagccattgccgcaaagataatcaatgacgttacgaaagtaatacgagattgtccttgtaacaaggaaattctggaagcttttgctaagcaaccagagaagaaaggtgaaataatcccttccaataaacctggatcttcttcatccaagttaaagaagtattcgtaccccaatactggagtaggaaactcaaacctaggtagttctgaaaaccctaaagcccttacctggccttttggatcatagaatgcctagaaccgtgggtcaaaccatagatgacttctggtcaaatctaggtgtaaaccagctagatgaacatgagttcgatcttatgatcaacctcatgaccgacgatgatgtatcctcggatacatcctttgatagtttaacctctctcttttctgagttattacaggttgaacaggaaatcacttcggaagaagaaagatgccaacttcttgaaaaagaagacagttctgacgaatccatacccaacgattctgatgaagaaagcgttcctgaacaagtcaggatggaaaaaggcaaaggaccggccaaaccatacgactacttcgacaacgaaagcagcgatatggaatatggagattacaatccatacggcagaagcgggcaaacaaacaaacccgcaagaacacgaccaaaattggccagtgaaacacttggacgaaatccaaggattctcaatctcgactgcaccaacagtctgagagacagaaaaagattagtagaagaatggggagccgaaatcagcctcaccatccaaactaatctagacgaatattccgaccctgacatggtgttactattaatggagcatctgacggccggaagtgtcaaatcgttcatcaagacaacgaaatggagtgaactatccggaggaatctatgaccttgtcatggaaggaattcacgtcatgtttcttggcgaacaaccaaatgaagctttcgacaaagctaaagaacaagcagcagcaaaggacaaactccttaagatgcagctctgtgatatatgttctctcgacacattcacctgtgccttcgagaaagcattatacaaactcgattccggagactttcctccaattatcgagcaatatctggcgaaaataccggaggtaggcgccaaagcccagcagcgatacaaagaagaagctactggagcaatgaaatacagtcttggatttgccaacaagattgttaaggaagaattgaagaaggtgtgcgagctcaccagacttcaaaagaaactgaagaaattcagaaaaacctgttgcaaacaggttgaagaaagattggaatatgggtgcaggcccatatacaaaaagaaatccaagcggaggaagcccaaagtccgcaaatacaaaaagtacaaaccctttaaacgacgaaagaagtttaaaacaggaaagtactttcggcccaaaaccgaaaagaaagtttgcccaaaaggcaaaggaaagaattgcaaatgttggatttgcaatgtcgaaggccattacgccaacgaatgtcctaatcgacaaacttctcagaaggctcacatccttcaagaagccattcaacttggtctccagccagtagaagacgtctacgaaggagaacaagaagtattcgttatcgaatacatagaagtttcagaagatgaaacctcaacctctgaagacgatggaacatctacttcagaagactcagattcagactgagcaggtgatgaacatcaccaacccaaactcgatttacatccgaggaaggctatacttctcaggatacaagatcgtggagctcgactgtttcgtagatacaggagcaagtctgtgtattgcaagcaaacacgtaataccagaagaaagatgggaagcagctcccagaaagatcaacgtgaagatcgccaatgaaagcacgatcacgctcgataagatatgtcgtaacctcgacatcatcattgccggagaacgattccacattgacgtcgtcttccagcaagaaagcggtatcgacttcatcatcggtaataacttctgtcaggagtactctcctttcatacagttcacaggacacattgtgttcacgatgaaagatcaataccaagtaccaatcacgaagctccgacgagctttcaagagaggaattcctggatttttagaatccatgaagaagagatcaacggctcaacaacctgaaccgctcaacatctctacaaataaaaccgtttcactttcaagggggaggaggtttggagaaaaactcagaatcacccaagaaaggatggtaaaaatcgaagaactacttgaaaaagtttgttctgagaacccattggacccagagaagtccaaaggatggatgcaagccagcatcaaactatcggatcccacgaaggttatcaaggttaaacccatgaaatatagcccaatggaccgagaagaatttgagaagcaaattcaagaattactggacctcaaggtaatcaggcccagtaaaagcccacatatggcaccagcgttcttagtcaacaacgaagctgagaaacgcagaggaaagaagcgtatggtggtcaactacaaagcaatgaatgatgcgactgtaggcgacgcatacaatcttcccaacaaggatgaactccttacgctcatcagaggaaagaaaatcttctcttcctttgactgcaaatcaggattctggcaagttaggcttgacgaagaatcaaaatccttaacggcgtttacatgcccacaaggacactatgagtggaacgtggtccccttcggcatgaagcaggcaccatcgatattccaaagacacatggatgaagcattcaaagtgtttaggaagttctgctgcatatacgttgacgacatcctcgtcttcagcgacaacgagcagaatcatcaacttcatgttgcgatgattctccagaaatgctatcaacatggcatcatactttccaagaagaaagcacagctcttcaaagaaagaatcaacttccttggcctggagatagatcaaggaacgcatagacctcaatcgcatatcttggaacacatccaaaagttcccagatatcattgaaagcaagctacagcttcaacgattcctcggagtactaacatacgcctccgactacatcccgaagctagctcaaatccgaaagcctctgcaagccaagctcaaggaaaacgttcaatggagatggactcctgaggacacattatacatgaagaaggttaaaaagaatctcaacggattccctcctcttcatcatccccttccagaagagaagctgattatcgagaccgatgcatcagacaactactggggaggtattctcaaagctattcatatagatttatctactaacgaatctattgaattagtttgcagatatgcatcaggcagcttcaaacctgctgagcaaaattaccatagcaacgataaagaaacgcttgcggtaataagaactattcaaaagttcagtatttatctgacaccggtaagatttctggtaagaacagataatacgcactttaagtatttccttaatattaattataaaggagattctaaaatgggtagaaatatccgatggcaaggttggttgcaaaactatgtctttgatgttgaccacattaaaggcactaacaattgcctcgcagattttttatcaagggaattcaatggagcttagcgcgtcttttgaaatccgtcaacagaaacgcgacacgcgtaaaagatgacaccatacacttgtggtgagaatcaataggccactgcctatataaacactctatcaccgatctgaaaaactcagatcctcaaaatggaggaaatagataaactcttacttcaagagaaaatcttattactagagctcgatctagtaagggcaaagataagcctagctagagccacaggctcgatgcaacaaaaggaagaaattccttgccgtgaaacaccggtaaatactctcacgagtaaattggttattatggagccagggcaatcgtccaaatctataactattccagagcaaacggctcatggtaaagaatcaacaaatccgttgatggctagtcttttgccaaaagagacaaaggtggtacagaccactagactggttaaaccagaggactttttacgtccaaacatgggtattccaatcccagaaaaagctgagcctagcagttcagttggtcctaacaggccagaaaaggagattcaaactcctcataacaactactatgttgtatataacggtccatatgccggtatatatgacaattggggttgtgccaagtctgcgacaaacggagttcccggagttgcacacaaaaagtttgccactattactgaggcaagaaagtctgcagacgagttcaccactgctgcaggaaaagataggcttaacttcgtccccaaaggcgaattagtcaagccaaagacttttgcaaaggccgtaacaagccctaaaaagtcaactcaatggatcactctcggaactaaaaagcctaagaaggatccagaaccaaaggagatcgcctttcaaccggagatcactattgaagacttccagtatctctatgatcttggaagaaaatacgatggcgaaggagacaccaccttcttcaccaccgacaagaagaacatatccatgttcaacttcctgaagaatgcagatccacagatgatctcggaatgctttcaagcaggactaatcaagacgatctaccccagtgcaaatctgcaggagatcaaatatcttcccaagaagataaaagatgcagtcaaaaaatacagaacaaactgcatcaagaacactgagaaagacatctttctcaagatcaagagcaccatcccagtctggagtgctacagggcttttacacaagcctaaatacatgatcgagatcggtgtctcgggaaaagttcgacctgaagaatctaagtccatggagtcaacgattcagaaggaagaattaatggaccttgcggtcttaaaggcgcaaacattcattgacagcctaatgaagatcaatcaacgcgaaaagatcttcgtcaacatggtagactatgaaacactagtctactcaaagaacttgaagaagacgactcaggaagacaggagcgtcatcaacaagtttcagcaaaagctgattagtggaaaaatccttggattccactctccagcaatctgccagcacataaaggtgacagcagaaaaagaagattgtgactaccactgcaatcagtgcgaatcttcaaaaggaaaggctatcgtttgcgataagcctgccgacagtggtccagccgacaatggagggccccagacacgtgaagacgcgtctgccgacagtgggtctcggacaacagacaccacgcactcagcaagtggatgaaataattcatctgctgacgtaagggatgacgatcaatcccactatcccaagacccttcacttctatataagtgaagttgcttcatttggagaaggcatctcgaaatctcaacacaactcgagctctcccttctctcttctttatctctctaaatgtgtgagtagaatcccgataagggaataggtagctacagagatcccggcctacgggccaattaaggggatctcctaaaatgtttgtattttcctttgtattatccagaaataaataaagaaaacctttacaaaaacccgagtgttctcccgcctttctctaaatctcatgtatctcaatagatactccgtctgaatagcaatcctccacgggacgctgtgagcctggagacctgatgccgtttgaagctgaagaagtaccgccgaggcagggggccgtttagggaaaaagtaagcgaggctggtttggcagcagtgactcaacctagggagtattcagatagacggaggtagatgaaagacaacgagaaaacaggaagttccgacggacactgttcaggtcagatttatttaaatctgttaatactctcattaaggagattaaccctaattagtggatctaaggggctacttataaacccttatcaatttaaaatcttgttaatcaagaaactaaacaagtggtttaaatgccacaaatcaaccttccgcagcacgaatctggtcgtgcaaaaat

SEQ ID NO: 657 - DNA, 2613 bp, Bean latent virus
  source 1..2613: mol_type = genomic DNA
accggatggccgcgcgattttttttatcccttgatcctacggtcgcccgcaattcgcgcttggtccatgtgaatgtgataaaaagtgaccaatcatgtttcgtttgacgagtctaattattgtttcttcgtccccacgtgatggaccaagtgctttatatatttgaattaaatgcttatcctctttaattcaaaatgcctaagcgcgatgccccgtggcgcacaatggcggggacctccaaggtcagccgctccgcgaattattcgcctcgtggaggtatgggtccaaagatggacaaggcctctgcttgggttaacaggcccatgtataggaagcccaggatatatcgggtccaaagaggacctgacgtccctagaggctgtgaagggccttgtaaggtccagtcatttgaacagcgtcatgatatttctcatgttggtaaggtcatttgtatatctgatgtcacacgtggtaacggtattactcatcgtgtgggaaaacgtttttgtgttaagtctgtgtatattttaggtaagatatggatggacgagaatattaaattgaagaaccacacgaacagcgtcatgttctggttggtcagagacagaagaccatatggcacgcctatggattttggtcaagtctttaacatgtatgacaatgagcccagtactgccactgtcaagaacgatcttcgtgatcgttttcaagttttacacaggttctatgcgaaggtgactggtggtcagtatgctagcaacgagcaggctattgttaggcgattttggaaggtgaataatcatgtcgtgtacaatcatcaagaagcagccaagtacgagaatcacacggagaatgcgttactattgtatatggcatgtacgcatgcctccaatcctgtatatgctacgttgaaaatacgtagttatttctatgactcgatttccaattaataaatgttaaattttattgaatgatcttctattacatgagttacatatggtctgtctgttgcgaaagcaacagctcgaattacattattaattgaaataacgcccaaattgtctaagtacaacatgactaaatgcctaaatctatttaagtaagtcgttccagaaactcgaatcaatgtcgtccagacttggaaatttagatacgctttgtgtagatccagagccctcctcaggttgtggttgaaccttatctggatgtggaatatcctcgtcaaggagaacggtggatcctctactcttgttatcttgaaataaaggggatttggcacctcccagataaaaacgccactctctgcttgatgcgcagtgatgggttcccctgtgagtgaatccatgattgaagcagttgatgtgtaggaagatcgaacagccgcactccaagtcgattcttctacgtcggactgccctgcgttttgcaaaccggtgctgaggtttgatagaggggggagttgaggaagatgaatttcgcattatgaagcgtccacgcttttagatgtgcattctcttgtctatccaagtagtctttataactcgccccctctcctggattgcaaagcacaattgatgggataccacctttaatttgaactggctttccgtacttgcaatttgtttgccaattcttttgggccccgataagctctttccagtgcttcatctttaagtattgtggagcgacgtcatcaatgacgttgtaatctacattatttgaatagacaaaagaattgaaatccaggtgtccactcaagtaattatgagaacctaatgaacgtgcccacattgtttttccagttcttgaatcaccttcaatgatgatactaataggtctctctgtccgcgcagcggcaccccttccgaaataatcgtcagcccattgttgcatatccagtggaacgttgttgaacgacgattgtggaaatggaggaacccatggttccgggggtttttggaatatccttgttgcgtttgagaccagattatgatattgaaggaagaaatgttgaggttgttcttccttgattatctgcagagccgcttctgcagaacctgcatttaatgccttcgcgtatgtgtcgttagcagattgctgacctcctctagcagatctgccgtcgatttggaactctccccattcaattgtatctccatccttgtcgatgtaggacttgacatcggagctggatttagctccctgtatgttcggatggaaatgtgctgacctggttgtggagaccaggtcgaagaatctgttatttgaacattggtatttcccttcgaactggataagcacgtgtagatgaggttgcccatcttcatgtgtttctctgcatatcttgataaacttcttgttaactggagttgttagacgttgtaattgtgataatgcctcttctttggatatggaacactgaggatatgtgaggaagtagttcttggcatttaagcgaaagcgtttcgggagtggcatatttgtaataagaggggtgtacaccgattgaggctctctcaaaactgtcataatgaatcggtgtatggtgtacaatttatactagaaccctcaatctcaatttctgcacacgtggcggccatccgatataatatt

SEQ ID NO: 658 - DNA, 2756 bp, Rice latent virus 1
  source 1..2756: mol_type = genomic DNA
atggcgaatttctctatcctcactgactcggcctaccctacggttccttcgcctccaagtcaagcggtgtcggccgggtttgaaggtgctctgacgacgcttttcctcgtcgttatcggctctctattgttcgttggcgtgttctatctcggctgggttctctgcgtgaaggacctcgtcctcaccttcaaggcccgccgccaaaggaggaccgaggagatcggtttcgggaacactcccgcgagggttgatgccaggggggtctaagagggcctcgtccgggaaagatggttcgaggccgaagcgtcgcaagggagagcccgaggccgcctttagggcccgcatattgggctgggcctcttcccagttcgggaggagggtctacggtggcgttggttcgtcgcagagtgctccgctgcaggtgcggacgtacaagtgggagaatccggacaagagtgccattgctatcgataccggctccatatggatcgtcaatacgttggacgctggtaacggggatgaccagagacatactcacaagactattatctacaagatgctgtttcagggtacgatgtggattaatgatgccacgtcggcagtctgcgggccactgacagttcatttctggctggtgtatgatgctgcgccgaagggggttcttcctgcccttactgacatattcgaggagggattctctggcctgggttcaacctgggtcgttaaccgggacaacgttcaccggttcgtggtgaagaggaggtggcagatgcgactgatgaccaatgggcagaagccgtactacactaaccgcagtgggaacggagatcccaccagtgtcacgatacgggacttcaggaagttcttcacgaagctgcgtactgcaacggagtggaagaactccgcaacaggagggataggggatataaagaaaggggccctatatctttgtgccatgtgttcgcaggcacctgaggggtccgctagagctattaacctgggggtgaagtttaggggccagagccgcatatacttcaaatgtaccggaaatcaatgataataaaacataatattttattcagattccatagatccgttattacaaggcagtacagtttgtacgacgaagcacagtatagcgacggatggagcactgtgcgtagcgtccggaggaggttggtagggcggtattagggaagaagggcaacatacaataccatacacacattattacacactaagcacccgaagggtgcttgaagaaactatccccttcatacatgtaatgtatcacgcagttgctttcgatgtacttggtctgagccggtgtacattgactcagccagtcttcgtcttcatttaccaggacgatggaggggatcccaccacttattaccttccgcttgccgtacttaggattgacggtgtagtcacggtgacatccgattagctgcttccaattagggcagtacttgaacgggatgtcgtctataacattgtattgtgcggtggggtcataagtggtgaagtccaccagtccgttccaatagttgtgcttcccgaggcttcttgcccaggttgtctttcctgttcgggttggtccgcatacatatagggaggtatatcttctggcggttgttggagcatcctggatgtcaaatcatggacgtgctgtagatattcggcagtagttacatcaagataatccatgttttgacgtgtttgtgtgtatacttcttcacataccgtgtatgtctttatgttctctgtggcccactgactcagctgttcgctgcaacgtagctgatcagtggggacagagcttgcgtatggagttacggtggtggggaagagcttctctgcgctgtactcgaactgggccagcctagttgcccagtcgaaggggaatgtctggcgtaccatagagaggtactctgttttcgaggtggacgaggagatgattttcctcatcttggtgtccttggtgtcagatccaggggccctcctcttgagggtcttcttgctgaacggtttggcgttgtagaattcgccccattctgcaatactgacggttcccggcttggtgatgtagtctctgacctgcttgcagttctgagcaggctgacagttaggatgataagactgatagtcaaaaaacctagagtctttggtctccaggcggttagatagctgtaaaagggtgtgtaggtgaaaggatccatctttgtgactctcacgagtaacaagtatgtagataggtacacgactgtggagcagagtaagaagatagtgaaggagttcccaaggatcaacaggacacttaggataggtgaggaagaagtacttggtccgtacgctgaattggtgggaagtggagggatcggccatgagtgaagcggagccgttggatttggctgaaagggacgtgcgggagaatcccggttgtccaaaggctgcttttcccacaaatctataccctagaccagtgcgatgtgggaagtgccttaggtgggaaccttgggccggctatttatatgggtgtcaaagtggctgtagttgggccttggcccactccagccgggggccggaaagcgaaatcgcactgatataatgttaccagtgcgatttctctttccgagcgcgatagcgcgaggcgccgggttccgcgtaccttctacgctgggtcgcctttatgtgtgatgggacgtaaggggggattcccattaatttattagtgcgctccatgacatcggggg

SEQ ID NO: 659 - DNA, 2843 bp, Rice latent virus 2
  source 1..2843: mol_type = genomic DNA
atgtggatggaaagcggacacctaccgcaggtagggtatcaggtgcaaccttctccgccggccgtaacctcgacgttcgttggaaacgacggcgcctggaggtttctcgttttattgaccgcttgttcttgcctagcaggggcagccgtattcgcatgctggcgcatgtgtggtaaggacttgctcctgaccttgaaggcgaagcgtagcaggacgataaccgagctaggtttcggccagacgcctgaacagcgtcgagctggaacgagttctcaaccagtgggcgtcatcggctaacgatcgaggtggagtctggtcttttgggtctggtcagcgtcccagttggccctctagcccggcacggatgccggcgaggactggtagcgctcgtcgtaaacggaaggatgattgggcgtgggattcggccactcgtcgccgtgttcgtccgaggacgtcttatgttccccgtggtggtccgcgagttcgcaggcctagcctgcagtatgtgaatccggggttacttggttccaccgcggtacatgtggctgatacgaatggggaggttagaattataacaggatactcgcgcgggagcgacgagcagtcgcgtcataccaacgagactataacgtacaagttatcactggacctctatgtcacggtggacacagagtgccagaaatatgttggtaaaggcgttgcggtcgcatggttggtctacgatgcgcagcctacaggagagatgccggcagcatcgacaatattcccccatgttgcggatatggctactgcgccctgtacctggaaggtgggtagggaggtctgccatcgtttcgtggttaagcgtagatgggtgatcacgcttgagactaacgggcgtgtagccggtacggtctttcagggtgctaatggtgtcccaccatgtaatcgcacggtgtacttccataagttctgcaagagactcggtgtcagaactgagtggaagaacacctccggtggttcgatcggagacattaagacgggtgcccctgtacatagtgttcgcggcagggaaccagattaattacagagttcagggggttgtaagaaagtacttcaagtctgtgggtaaccagtaaaacggttacatgtaaaatagtttgtaataaaatgtcaattttattcattacaatacaggtggctgcgctaagcagctgttttgcaatacatacacactttacccaattatccctgggcggcgcgcggcgataagggaaaggggtaaacactaaacacgagactgaccttagttaacatctttccggcgctgttgcgccggtgtctgatataaagctgaaattatatagactcatattaaatatgatgcagttgctctcgaagtacgagagctgttcagcagtcattgctttaggccagtcgtcgtcatcgttaacgatgacaattgaagggattcctcctttgatgagcttctttttcccgtatttcggattaacggtgtaatccttctgagctccgacgagggccttccagcaaggacagaacttgaagggtatatcatctattatattatatagagcttcgggatcatacatcccgaagtctacgttattctggtagtaattgtgtctgccgaggcttctagcccaagtagactttcctgtccttgatggtccgcagatgtagaggctgattggtctcgcctgcttgcaaagcatgtatcatgtagccatcgtagatctgcctcagcgtcagaatgaggatggagcaacgaatatacctgcggggttacatggtagatgttctcggcagcccattctgtgagtgtttcatggcaatgaaacatggagtcattgaacggtggttcatatgttaccggtggatcaggaaatagcttctgagaagcatactcccaggcttgcagcctggcgcagtagtcgtacggaaaccacttcttgaccccgttcatgtactccatccttgaggtcgccgagcgtaggatgtcagccattatctggtctttagtcattcttcgtcgcttgttggccagctcggaggaggtgttacctccctcggccgagctggaggaatccccagcagctctcctaatcgtcgtagaaggtccagcctctccattcccagtcggaggaactccgaatgatcctcggggccgaaaggagcccttatgccattctcctgtaggatgtttgagaatataagccagtacagctttagggtttcttgtaccttgtatatttggatgataatccatattatcaaaaaaacttgagtcatgtgtgcgaatgcgatgacgagtctgagcaagagcatggagatggggagtcccatctttatgaagctcagaagcacataaaacgccgtaaggcctgagcagattccagaggaataagcccattgtatgaggctcttggctacatcgtggataagtgaggaagacatttttgttctggaaggcaaagttatgtggttgctcagatgcggattcagtgttggtcatagggttccaacacttagccgcaaaaccgaactccggtgttttactctctagaaccctcttacaggcgatacccgaacgacccaggcttgggccaatttatagttggccggggtttctttgccggcccataccgaggccaaaggggatcgccaccgcataatattacagcgatcccctttgggccgaggggacattcgtgcgctctgattgtccccgaggccttcgcaattaagcatctactttaataaagtgatagtgaaattacgcggtattgcgtgttatccacgccctagtggactacataagtgaggtctttgggctttgttgg

SEQ ID NO: 660 - protein, 679 aa, Horseradish latent virus
MKPQPLKTMEHLLQKTQIQTEQVMNITNPNSIYIRGRLYFSGYKIVELDCFVDTGASLCIASKHVIPEERWEAAPRKINVKIANESTITLDKICRNLDIIIAGERFHIDVVFQQESGIDFIIGNNFCQEYSPFIQFTGHIVFTMKDQYQVPITKLRRAFKRGIPGFLESMKKRSTAQQPEPLNISTNKTVSLSRGRRFGEKLRITQERMVKIEELLEKVCSENPLDPEKSKGWMQASIKLSDPTKVIKVKPMKYSPMDREEFEKQIQELLDLKVIRPSKSPHMAPAFLVNNEAEKRRGKKRMVVNYKAMNDATVGDAYNLPNKDELLTLIRGKKIFSSFDCKSGFWQVRLDEESKSLTAFTCPQGHYEWNVVPFGMKQAPSIFQRHMDEAFKVFRKFCCIYVDDILVFSDNEQNHQLHVAMILQKCYQHGIILSKKKAQLFKERINFLGLEIDQGTHRPQSHILEHIQKFPDIIESKLQLQRFLGVLTYASDYIPKLAQIRKPLQAKLKENVQWRWTPEDTLYMKKVKKNLNGFPPLHHPLPEEKLIIETDASDNYWGGILKAIHIDLSTNESIELVCRYASGSFKPAEQNYHSNDKETLAVIRTIQKFSIYLTPVRFLVRTDNTHFKYFLNINYKGDSKMGRNIRWQGWLQNYVFDVDHIKGTNNCLADFLSREFNGA

SEQ ID NO: 661 - protein, 358 aa, Bean latent virus
MPLPKRFRLNAKNYFLTYPQCSISKEEALSQLQRLTTPVNKKFIKICRETHEDGQPHLHVLIQFEGKYQCSNNRFFDLVSTTRSAHFHPNIQGAKSSSDVKSYIDKDGDTIEWGEFQIDGRSARGGQQSANDTYAKALNAGSAEAALQIIKEEQPQHFFLQYHNLVSNATRIFQKPPEPWVPPFPQSSFNNVPLDMQQWADDYFGRGAAARTERPISIIIEGDSRTGKTMWARSLGSHNYLSGHLDFNSFVYSNNVDYNVIDDVAPQYLKMKHWKELIGAQKNWQTNCKYGKPVQIKGGIPSIVLCNPGEGASYKDYLDRQENAHLKAWTLHNAKFIFLNSPLYQTSAPVCKTQGSPT

SEQ ID NO: 662 - protein, 354 aa, Rice latent virus 1
MADPSTSHQFSVRTKYFFLTYPKCPVDPWELLHYLLTLLHSRVPIYILVTRESHKDGSFHLHTLLQLSNRLETKDSRFFDYQSYHPNCQPAQNCKQVRDYITKPGTVSIAEWGEFYNAKPFSKKTLKRRAPGSDTKDTKMRKIISSSTSKTEYLSMVRQTFPFDWATRLAQFEYSAEKLFPTTVTPYASSVPTDQLRCSEQLSQWATENIKTYTVCEEDAPTTARRYTSLYVCGPTRTGKTTWARSLGKHNYWNGLVDFTTYDPTAQYNVIDDIPFKYCPNWKQLIGCHRDYTVNPKYGKRKVISGGIPSIVLVNEDEDWLSQCTPAQTKYIESNCVIHYMYEGDSFFKHPSGA

SEQ ID NO: 663 - protein, 382 aa, Rice latent virus 2
MTNTESASEQPHNFAFQNKNVFLTYPRCSQEPHTMGLFLWNLLRPYGVLCASELHKDGTPHLHALAQTRHRIRTHDSSFFDNMDYHPNIQGTRNPKAVLAYILKHPTGEWHKGSFRPRGSFGVPPTGNGEAGPSTTIRRAAGDSSSSAEGGNTSSELANKRRRMTKDQIMADILRSATSRMEYMNGVKKWFPYDYCARLQAWEYASQKLFPDPPVTYEPPFNDSMFHCHETLTEWAAENIYHVTPQARPISLYICGPSRTGKSTWARSLGRHNYYQNNVDFGMYDPEALYNIIDDIPFKFCPCWKALVGAQKDYTVNPKYGKKKLIKGGIPSIVIVNDDDDWPKAMTAEQLSYFESNCIIFNMSLYNFSFISDTGATAPERC

SEQ ID NO: 664 - DNA, 2040 bp, Horseradish latent virus
  source 1..2040: mol_type = genomic DNA
atgaaacctcaacctctgaagacgatggaacatctacttcagaagactcagattcagactgagcaggtgatgaacatcaccaacccaaactcgatttacatccgaggaaggctatacttctcaggatacaagatcgtggagctcgactgtttcgtagatacaggagcaagtctgtgtattgcaagcaaacacgtaataccagaagaaagatgggaagcagctcccagaaagatcaacgtgaagatcgccaatgaaagcacgatcacgctcgataagatatgtcgtaacctcgacatcatcattgccggagaacgattccacattgacgtcgtcttccagcaagaaagcggtatcgacttcatcatcggtaataacttctgtcaggagtactctcctttcatacagttcacaggacacattgtgttcacgatgaaagatcaataccaagtaccaatcacgaagctccgacgagctttcaagagaggaattcctggatttttagaatccatgaagaagagatcaacggctcaacaacctgaaccgctcaacatctctacaaataaaaccgtttcactttcaagggggaggaggtttggagaaaaactcagaatcacccaagaaaggatggtaaaaatcgaagaactacttgaaaaagtttgttctgagaacccattggacccagagaagtccaaaggatggatgcaagccagcatcaaactatcggatcccacgaaggttatcaaggttaaacccatgaaatatagcccaatggaccgagaagaatttgagaagcaaattcaagaattactggacctcaaggtaatcaggcccagtaaaagcccacatatggcaccagcgttcttagtcaacaacgaagctgagaaacgcagaggaaagaagcgtatggtggtcaactacaaagcaatgaatgatgcgactgtaggcgacgcatacaatcttcccaacaaggatgaactccttacgctcatcagaggaaagaaaatcttctcttcctttgactgcaaatcaggattctggcaagttaggcttgacgaagaatcaaaatccttaacggcgtttacatgcccacaaggacactatgagtggaacgtggtccccttcggcatgaagcaggcaccatcgatattccaaagacacatggatgaagcattcaaagtgtttaggaagttctgctgcatatacgttgacgacatcctcgtcttcagcgacaacgagcagaatcatcaacttcatgttgcgatgattctccagaaatgctatcaacatggcatcatactttccaagaagaaagcacagctcttcaaagaaagaatcaacttccttggcctggagatagatcaaggaacgcatagacctcaatcgcatatcttggaacacatccaaaagttcccagatatcattgaaagcaagctacagcttcaacgattcctcggagtactaacatacgcctccgactacatcccgaagctagctcaaatccgaaagcctctgcaagccaagctcaaggaaaacgttcaatggagatggactcctgaggacacattatacatgaagaaggttaaaaagaatctcaacggattccctcctcttcatcatccccttccagaagagaagctgattatcgagaccgatgcatcagacaactactggggaggtattctcaaagctattcatatagatttatctactaacgaatctattgaattagtttgcagatatgcatcaggcagcttcaaacctgctgagcaaaattaccatagcaacgataaagaaacgcttgcggtaataagaactattcaaaagttcagtatttatctgacaccggtaagatttctggtaagaacagataatacgcactttaagtatttccttaatattaattataaaggagattctaaaatgggtagaaatatccgatggcaaggttggttgcaaaactatgtctttgatgttgaccacattaaaggcactaacaattgcctcgcagattttttatcaagggaattcaatggagcttag

SEQ ID NO: 665 - DNA, 1077 bp, Bean latent virus
  source 1..1077: mol_type = genomic DNA
atgccactcccgaaacgctttcgcttaaatgccaagaactacttcctcacatatcctcagtgttccatatccaaagaagaggcattatcacaattacaacgtctaacaactccagttaacaagaagtttatcaagatatgcagagaaacacatgaagatgggcaacctcatctacacgtgcttatccagttcgaagggaaataccaatgttcaaataacagattcttcgacctggtctccacaaccaggtcagcacatttccatccgaacatacagggagctaaatccagctccgatgtcaagtcctacatcgacaaggatggagatacaattgaatggggagagttccaaatcgacggcagatctgctagaggaggtcagcaatctgctaacgacacatacgcgaaggcattaaatgcaggttctgcagaagcggctctgcagataatcaaggaagaacaacctcaacatttcttccttcaatatcataatctggtctcaaacgcaacaaggatattccaaaaacccccggaaccatgggttcctccatttccacaatcgtcgttcaacaacgttccactggatatgcaacaatgggctgacgattatttcggaaggggtgccgctgcgcggacagagagacctattagtatcatcattgaaggtgattcaagaactggaaaaacaatgtgggcacgttcattaggttctcataattacttgagtggacacctggatttcaattcttttgtctattcaaataatgtagattacaacgtcattgatgacgtcgctccacaatacttaaagatgaagcactggaaagagcttatcggggcccaaaagaattggcaaacaaattgcaagtacggaaagccagttcaaattaaaggtggtatcccatcaattgtgctttgcaatccaggagagggggcgagttataaagactacttggatagacaagagaatgcacatctaaaagcgtggacgcttcataatgcgaaattcatcttcctcaactcccccctctatcaaacctcagcaccggtttgcaaaacgcagggcagtccgacgtag

SEQ ID NO: 666 - DNA, 1065 bp, Rice latent virus 1
  source 1..1065: mol_type = genomic DNA
atggccgatccctccacttcccaccaattcagcgtacggaccaagtacttcttcctcacctatcctaagtgtcctgttgatccttgggaactccttcactatcttcttactctgctccacagtcgtgtacctatctacatacttgttactcgtgagagtcacaaagatggatcctttcacctacacacccttttacagctatctaaccgcctggagaccaaagactctaggttttttgactatcagtcttatcatcctaactgtcagcctgctcagaactgcaagcaggtcagagactacatcaccaagccgggaaccgtcagtattgcagaatggggcgaattctacaacgccaaaccgttcagcaagaagaccctcaagaggagggcccctggatctgacaccaaggacaccaagatgaggaaaatcatctcctcgtccacctcgaaaacagagtacctctctatggtacgccagacattccccttcgactgggcaactaggctggcccagttcgagtacagcgcagagaagctcttccccaccaccgtaactccatacgcaagctctgtccccactgatcagctacgttgcagcgaacagctgagtcagtgggccacagagaacataaagacatacacggtatgtgaagaagatgctccaacaaccgccagaagatatacctccctatatgtatgcggaccaacccgaacaggaaagacaacctgggcaagaagcctcgggaagcacaactattggaacggactggtggacttcaccacttatgaccccaccgcacaatacaatgttatagacgacatcccgttcaagtactgccctaattggaagcagctaatcggatgtcaccgtgactacaccgtcaatcctaagtacggcaagcggaaggtaataagtggtgggatcccctccatcgtcctggtaaatgaagacgaagactggctgagtcaatgtacaccggctcagaccaagtacatcgaaagcaactgcgtgatacattacatgtatgaaggggatagtttcttcaagcacccttcgggtgcttag

SEQ ID NO: 667 - DNA, 1149 bp, Rice latent virus 2
  source 1..1149: mol_type = genomic DNA
atgaccaacactgaatccgcatctgagcaaccacataactttgccttccagaacaaaaatgtcttcctcacttatccacgatgtagccaagagcctcatacaatgggcttattcctctggaatctgctcaggccttacggcgttttatgtgcttctgagcttcataaagatgggactccccatctccatgctcttgctcagactcgtcatcgcattcgcacacatgactcaagtttttttgataatatggattatcatccaaatatacaaggtacaagaaaccctaaagctgtactggcttatattctcaaacatcctacaggagaatggcataagggctcctttcggccccgaggatcattcggagttcctccgactgggaatggagaggctggaccttctacgacgattaggagagctgctggggattcctccagctcggccgagggaggtaacacctcctccgagctggccaacaagcgacgaagaatgactaaagaccagataatggctgacatcctacgctcggcgacctcaaggatggagtacatgaacggggtcaagaagtggtttccgtacgactactgcgccaggctgcaagcctgggagtatgcttctcagaagctatttcctgatccaccggtaacatatgaaccaccgttcaatgactccatgtttcattgccatgaaacactcacagaatgggctgccgagaacatctaccatgtaaccccgcaggcgagaccaatcagcctctacatctgcggaccatcaaggacaggaaagtctacttgggctagaagcctcggcagacacaattactaccagaataacgtagacttcgggatgtatgatcccgaagctctatataatataatagatgatatacccttcaagttctgtccttgctggaaggccctcgtcggagctcagaaggattacaccgttaatccgaaatacgggaaaaagaagctcatcaaaggaggaatcccttcaattgtcatcgttaacgatgacgacgactggcctaaagcaatgactgctgaacagctctcgtacttcgagagcaactgcatcatatttaatatgagtctatataatttcagctttatatcagacaccggcgcaacagcgccggaaagatgttaa

SEQ ID NO: 668 - DNA, 38 bp, synthetic construct
  source 1..38: mol_type = other DNA
ccactggattcagcgaagttatgcgtaaaggcgaagag

SEQ ID NO: 669 - DNA, 20 bp, synthetic construct
  source 1..20: mol_type = other DNA
ctgagtccagctacgagcag

SEQ ID NO: 670 - DNA, 19 bp, synthetic construct
  source 1..19: mol_type = other DNA
ccactggattcagcgaagt

SEQ ID NO: 671 - DNA, 21 bp, synthetic construct
  source 1..21: mol_type = other DNA
aacttcagcgtcagtttacca

SEQ ID NO: 672 - DNA, 23 bp, synthetic construct
  source 1..23: mol_type = other DNA
  misc_feature 1: note = 5' 6-FAM 520 fluorophore
  misc_feature 10: note = internal ZEN quencher
  misc_feature 23: note = 3' Iowa Black FQ quencher
cgagggtgaaggtgacgcaacta

SEQ ID NO: 673 - DNA, 20 bp, synthetic construct
  source 1..20: mol_type = other DNA
cctgctgtccatctgctctc

SEQ ID NO: 674 - DNA, 20 bp, synthetic construct
  source 1..20: mol_type = other DNA
ctgagtccagctacgagcag

SEQ ID NO: 675 - DNA, 20 bp, synthetic construct
  source 1..20: mol_type = other DNA
  misc_feature 1: note = 5' SUN 554 fluorophore
  misc_feature 10: note = Internal ZEN quencher
  misc_feature 20: note = 3' Iowa Black FQ quencher
acaagactgacagggccaaa